(19) United States
(12) Patent Application Publication
(10) Pub. No.: US 2018/0028554 A1
(43) Pub. Date: Feb. 1, 2018

(54) Oligomers Having Bicyclic Scaffold Moeities

(71) Applicant: BioMarin Technologies B.V., Leiden (NL)

(72) Inventors: Judith Christina Theodora Van DEUTEKOM, Dordrecht (NL); Peter Christian de VISSER, Leiden (NL)

(21) Appl. No.: 15/642,270

(22) Filed: Jul. 5, 2017

(30) Foreign Application Priority Data
Jul. 5, 2016 (EP) 16177973.1

(51) Int. Cl. A61K 31/712; C12N 15/113

(52) U.S. Cl. CPC A61K 31/712; C12N 15/113; C12N 2310/3231; C12N 2310/11; A61K 31/34

(57) ABSTRACT

The current invention provides oligomers with improved characteristics that enhance clinical applicability for treating, ameliorating, preventing a disorder or disease.

### FIELD

[0001] The invention relates to the field of oligomers which include bicyclic scaffold moieties. The invention in particular relates to oligomers having improved characteristics, thereby enhancing clinical applicability as further defined herein.

### CROSS-REFERENCE TO RELATED APPLICATIONS

[0002] The present application claims priority to EP patent application EP16177973.1, filed on Jul. 5, 2016, the contents of which are incorporated herein in their entirety.

### BACKGROUND OF THE INVENTION

[0003] Antisense oligonucleotides (AONs) are in (pre)clinical development for many diseases and conditions, including cancer, inflammatory conditions, cardiovascular disease and neurodegenerative and neuromuscular disorders. Their mechanism of action is aimed at various targets, such as RNaseH-mediated degradation of target RNA in the nucleus or cytoplasm, at splice-modulation (exon inclusion or skipping) in the nucleus, or at translation inhibition by steric hindrance of ribosomal subunit binding in the cytoplasm. Splice-modulating or splice-switching oligonucleotides (SSOs) were first described for correction of aberrant splicing in human β-globin pre-mRNAs (Dominski and Kole, 1993), and are currently being studied for a variety of genetic disorders including, but not limited to, cystic fibrosis (CFTR gene, Friedman et al., 1999), breast cancer (BRCA1 gene, Uchikawa et al., 2007), prostate cancer (FOLH1 gene, Williams et al., 2006), inflammatory diseases (IL-5Ralpha and MyD88 genes, Karras et al., 2001, Vickers et al., 2006), ocular albinism type 1 (OA1 gene, Vetrini et al., 2006), ataxia telangiectasia (ATM gene, Du et al., 2007), nevoid basal cell carcinoma syndrome (PTCH1 gene, Uchikawa et al., 2007), methylmalonic acidemia (MUT gene, Rincon et al., 2007), preterm labor (COX-2 gene, Tyson-Capper et al., 2006), artherosclerosis (APOB gene, Khoo et al., 2007), propionic acidemia (PCCA, PCCB genes, Rincon et al., 2007), leukemia (c-myc and WVVT1 genes, Renshaw et al., 2004, Giles et al., 1999), dystrophic epidermolysis bullosa (COL7A1 gene, Goto et al., 2006), familial hypercholesterolemia (APOB gene, Disterer et al., 2013), laser-induced choroidal neovascularization and corneal graft rejection (KDR gene, Uehara et al., 2013), hypertrophic cardiomyopathy (MYBPC3 gene, Gedicke-Hornung et al., 2013), Usher syndrome (USH1C gene, Lentz et al., 2013), fukuyama congenital muscular dystrophy (FKTN gene, Taniguchi-lkeda et al., 2011), laser-induced choroidal neovascularization (FLT1 gene, Owen et al., 2012), cancer (STAT3 and bcl-X genes, Zammarchi et al., 2011, Mercatante et al., 2002), and Hutchinson-Gilford progeria (LMNA gene, Osorio et al., 2011), Miyoshi myopathy (DYSF gene, Wein et al., 2010), spinocerebellar ataxia type 1 (ATXN1 gene, Gao et al., 2008), Alzheimer's disease/FTDP-17 taupathies (MAPT gene, Peacey et al., 2012), myotonic dystrophy (CLC1 gene, Wheeler et al., 2007), and Huntington's disease (Evers et al., 2014). However, splice-switching AONs have progressed furthest in the treatment of the neuromuscular disorders Duchenne muscular dystrophy (DMD) an spinal muscular dystrophy (spinal muscular atrophy (SMA) type).

[0004] Duchenne muscular dystrophy (DMD) and Becker muscular dystrophy (BMD) are the most common childhood forms of muscular dystrophy. DMD is a severe, lethal neuromuscular disorder resulting in a dependency on wheelchair support before the age of 12 and patients often die before the age of thirty due to respiratory- or heart failure. It is caused by reading frame-shifting deletions (˜67%) or duplications (˜7%) of one or more exons, or by point mutations (˜25%) in the 2.24 Mb DMD gene, resulting in the absence of functional dystrophin. BMD is also caused by mutations in the DMD gene, but these maintain the open reading frame, yield semi-functional dystrophin proteins, and result in a typically much milder phenotype and longer lifespan. During the last decade, specific modification of splicing in order to restore the disrupted reading frame of the transcript has emerged as a promising therapy for DMD (van Ommen et al., 2008; Yokota et al., 2007; van Deutekom et al., 2007; Goemans et al., 2011; Voit et al., 2014; Cirak et al., 2011). Using highly sequence-specific splice-switching antisense oligonucleotides (AONs) which bind to the exon flanking or containing the mutation and which interfere with its splicing signals, the skipping of that exon can be induced during the processing of the DMD pre-mRNA. Despite the resulting truncated transcript, the open reading frame is restored and a protein is produced which is similar to those found in BMD patients. AON-induced exon skipping provides a mutation-specific, and thus personalized, therapeutic approach for DMD patients. As the majority of the mutations cluster around exons 45 to 55, the skipping of one specific exon may be therapeutic for many patients with different mutations. The skipping of exon 51 applies to the largest subset of patients (˜13%), including those with deletions of exons 45 to 50, 48 to 50, 50, or 52. The AONs applied are chemically modified to resist endonucleases, exonucleases, and RNaseH, and to promote RNA binding and duplex stability. Different AON chemistries are currently being explored for inducing corrective exon skipping for DMD, including 2′-O-methyl phosphorothioate RNA (2OMePS; Voit et al., 2014), phosphorodiamidate morpholino (PMO; Cirak et al., 2011), tricyclo DNA (tcDNA; Goyenvalle et al, 2015), and peptide nucleic acid (PNA; Gao et al., 2015). Although AONs are typically not well taken up by healthy muscle fibers, the dystrophin deficiency in DMD and the resulting pathology, characterized by activated satellite cells and damaged and thus more permeable fiber membranes, actually facilitates a better uptake. In studies in the dystrophin-deficient mdx mouse model, 2′-O-methyl phosphorothioate RNA oligonucleotides have indeed demonstrated an up to 10 times higher uptake in different muscle groups when compared to that in wild type mice (Heemskerk et al., 2010). Although the recent phase I/II results with both 2′-O-methyl phosphorothioate RNA and phosphorodiamidate morpholino AONs in DMD patients confirm presence of the AONs in muscle biopsies, the different chemical modifications seem to result in a differential uptake by and distribution throughout muscle. Furthermore, in both studies the levels of novel dystrophin after treatment were still limited, which challenges the field to develop oligonucleotides with improved characteristics enhancing therapeutic index and clinical applicability.

[0005] Spinal Muscular Atrophy (SMA) is an autosomal recessive disease affecting 1 in 6000 newborn children, and is caused by mutations in the survival of motor neuron gene 1 (SMN1). It results in progressive loss of motor neurons in the spinal cord and subsequent atrophy of voluntary muscles. Clinical severity depends on naturally occurring exon 7 inclusion levels in the almost identical SMN2 gene and the number of copies of SMN2. In SMN2, a C>T transition in an exon 7 splicing enhancer site normally results in an unstable exon 7-skipped isoform and insufficient levels of full-length isoform (Khoo and Krainer, 2009). However, effective SMN2 exon 7 inclusion can be achieved by blocking an intronic splicing silencer in the 5′ region of intron 7 (ISS-N1; Singh et al., 2006; Hua et al., 2008) with splice-switching AONs. On the basis of successful mouse studies (Hua et al., 2010, 2011; Passini et al., 2011) a candidate AON (ISIS-SMN_{Rx}, ISIS396443, or nusinersen) is currently in clinical development by IONIS Pharmaceuticals (Carlsbad, Calif.). In phase 1 studies, direct injection of a single 9-mg dose of ISIS-SMN_{Rx} into the intrathecal space resulted in broad distribution in the central nervous system and some motor function improvement in children with SMA (Swoboda et al., 2014, Chiriboga et al., 2016). However, systemic SSO delivery may be needed to alleviate cardiac pathology and to increase peripheral motor neuron function and consequently survival.

[0006] Clinical efficacy of systemically administered AONs, such as splice-switching AONs, depends on multiple factors such as administration route, biostability, biodistribution, intra-tissue distribution, uptake by target cells, and routing to the desired intracellular location (nucleus). These factors are at least in part determined by the chemical structure of the AONs. Part of the invention shows that certain chemical modifications in the AON scaffold can lead to AONs that show improved characteristics for possible treatment of genetic disorders.

[0007] In conclusion, to enhance the therapeutic applicability of AONs such as splice-switching AONs for genetic disorders such as DMD, BMD, or SMA, there is a need for AONs with optimized chemical characteristics.

### DESCRIPTION OF THE INVENTION

### Oligonucleotide

[0008] In a first aspect, the invention provides an oligonucleotide comprising a 2′-substituted monomer, preferably a 2′-substituted RNA monomer, and a phosphorothioate backbone or consisting of 2′-substituted monomers, preferably of 2′-substituted RNA monomers, linked by phosphorothioate backbone linkages, and comprising a bicyclic nucleic acid (BNA) scaffold modification, and comprising a 5-methylpyrimidine base, preferably for use as a medicament for treating a disease or condition through splice modulation, such as through exon skipping, or exon inclusion, both of which are forms of splice switching. Preferred diseases in this context are Duchenne Muscular Dystrophy, Becker Muscular Dystrophy, and Spinal Muscular Atrophy.

[0009] For oligonucleotides as described in this application, when a feature of a monomer is not defined and is not apparent from context, the corresponding feature from an RNA monomer is to be assumed.

[0010] As such, in this aspect the invention provides an oligonucleotide comprising:
[0011] i) Ia) at least one 2′-substituted monomer and optionally a phosphorothioate backbone linkage, or
   [0012] Ib) only 2′-substituted monomers linked by phosphorothioate backbone linkages and/or by phosphodiester linkages,
[0013] ii) a 5-methylcytosine and/or a 5-methyluracil base and
[0014] iii) at least one monomer comprising a bicyclic nucleic acid (BNA) scaffold modification.

[0015] Preferably, said monomers are RNA monomers, or are derived from RNA monomers. Such oligonucleotides will be referred to herein as oligonucleotides according to the invention. As such, a preferred oligonucleotide according to the invention comprises:
[0016] i) Ia) at least one 2′-substituted monomer, preferably an RNA monomer or a 2′-O-substituted RNA monomer, and optionally a phosphorothioate backbone linkage, or
   [0017] Ib) only 2′-substituted monomers, preferably RNA monomers or 2′-O-substituted RNA monomers, linked by phosphorothioate backbone linkages and/or by phosphodiester linkages,
[0018] ii) a 5-methylcytosine and/or a 5-methyluracil base and
[0019] iii) at least one monomer comprising a bicyclic nucleic acid (BNA) scaffold modification,

[0020] Preferred oligonucleotides according to the invention have a length of less than 34 oligonucleotides. Said oligonucleotide may have 10, 11, 12, 13, 14, 15, 16, 17, 18, 19, 20, 21, 22, 23, 24, 25, 26, 27, 28, 29, 30, 31, 32, or 33 nucleotides. Such oligonucleotide may also be identified as an oligonucleotide having from 10 to 33 nucleotides. More preferred oligonucleotides according to the invention have a length of 16, 17, 18, 19, 20, 21, or 22 nucleotides, and may be identified as an oligonucleotide having from 16 to 22 nucleotides.

[0021] In another embodiment, the oligonucleotide according to the invention is from 16 to 25 nucleotides in length. In another embodiment, the oligonucleotide according to the invention is from 16 to 24 nucleotides in length. In another embodiment, the oligonucleotide is from 16 to 22 nucleotides in length. In another embodiment, the oligonucleotide according to the invention is 16, 18, 20, or 22 nucleotides in length. In another embodiment, the oligonucleotide according to the invention is 21, 22, 24, or 25 nucleotides in length. In another embodiment, the oligonucleotide according to the invention is 18, 22, 24, or 25 nucleotides in length.

[0022] In another embodiment, the oligonucleotide is from 16 to 25 nucleotides in length and is for skipping exons 44, 45, 51, or 53 of pre-mRNA of dystrophin. In another embodiment, the oligonucleotide is from 16 to 24 nucleotides in length and is for skipping exons 44, 51, or 53 of pre-mRNA of dystrophin. In another embodiment, the oligonucleotide is from 16 to 22 nucleotides in length and is for skipping exon 51 of pre-mRNA of dystrophin. In another embodiment, the oligonucleotide is 16, 18, 20, or 22 nucleotides in length and is for skipping exon 51 of pre-mRNA of dystrophin. In another embodiment, the oligonucleotide is 20 or 23 nucleotides in length and is for skipping exon 44 of pre-mRNA of dystrophin. In another embodiment, the oligonucleotide is 21, 22, 24, or 25 nucleotides in length and is for skipping exon 45 of pre-mRNA of dystrophin. In another embodiment, the oligonucleotide is 18, 22, 24, or 25 nucleotides in length and is for skipping exon 53 of pre-mRNA of dystrophin. Throughout this application, reference to dystrophin is preferably interpreted as reference to human dystrophin.

[0023] Encompassed by the above ((i)(Ia)) are oligonucleotides that comprise at least one 2′-substituted monomer, preferably a 2′-substituted RNA monomer, and no phosphorothioate backbone linkage. Such an oligonucleotide can have a backbone that only comprises phosphodiester linkages. Similarly encompassed are oligonucleotides that comprise at least one 2′-substituted monomer, preferably a 2′-substituted RNA monomer, and one or more phosphorothioate backbone linkages.

[0024] Encompassed by the above ((i)(Ib)) are oligonucleotides that comprise no other monomers than 2′-substituted RNA monomers, and that comprise only backbone linkages that are phosphorothioate backbone linkages. Similarly encompassed are oligonucleotides that comprise no other monomers than 2′-substituted RNA monomers, and that comprise only backbone linkages that are phosphodiester backbone linkages.

[0025] As known to the skilled person, an oligonucleotide such as an RNA oligonucleotide generally consists of repeating monomers. Such a monomer is most often a nucleotide or a nucleotide analogue. The most common naturally occurring nucleotides in RNA are adenosine monophosphate, cytidine monophosphate, guanosine monophosphate, thymidine monophosphate, and uridine monophosphate. These consist of a pentose sugar ribose, a 5′-linked phosphate group which is linked via a phosphate ester, and a 1′-linked base. The sugar connects the base and the phosphate, and is therefore often referred to as the scaffold of the nucleotide. A modification in the pentose sugar is therefore often referred to as a scaffold modification. For severe modifications, the original pentose sugar might be replaced in its entirety by another moiety that similarly connects the base and the phosphate. It is therefore understood that while a pentose sugar is often a scaffold, a scaffold is not necessarily a pentose sugar.

[0026] A base, sometimes called a nucleobase, is generally adenine, cytosine, guanine, thymine, or uracil, or a derivative thereof. Cytosine, thymine, and uracil are pyrimidine bases, and are generally linked to the scaffold through their 1-nitrogen. Adenine and guanine are purine bases, and are generally linked to the scaffold through their 9-nitrogen.

[0027] A nucleotide is generally connected to neighbouring nucleotides through condensation of its 5′-phosphate moiety to the 3′-hydroxyl moiety of the neighbouring nucleotide monomer. Similarly, its 3′-hydroxyl moiety is generally connected to the 5′-phosphate of a neighbouring nucleotide monomer. This forms phosphodiester bonds. The phosphodiesters and the scaffold form an alternating copolymer. The bases are grafted to this copolymer, namely to the scaffold moieties. Because of this characteristic, the alternating copolymer formed by linked monomers of an oligonucleotide is often called the backbone of the oligonucleotide. Because the phosphodiester bonds connect neighbouring monomers together, they are often referred to as backbone linkages. It is understood that when a phosphate group is modified so that it is instead an analogous moiety such as a phosphorothioate, such a moiety is still referred to as the backbone linkage of the monomer. This is referred to as a backbone linkage modification. In general terms, the backbone of an oligonucleotide is thus comprised of alternating scaffolds and backbone linkages.

[0028] In another embodiment, the nucleobase is adenine, cytosine, guanine, thymine, or uracil. In another embodiment, the nucleobase is adenine, cytosine, guanine, or uracil. In another embodiment, the nucleobase is a modified form of adenine, cytosine, guanine, thymine, or uracil. In another embodiment, the modified nucleobase is hypoxanthine, pseudouracil, pseudocytosine, 1-methylpseudouracil, orotic acid, agmatidine, lysidine, 2-thiouracil, 2-thiothymine, 5-halouracil, 5-halomethyluracil, 5-trifluoromethyluracil, 5-propynyluracil, 5-propynylcytosine, 5-aminomethyluracil, 5-hydroxymethyluracil, 5-aminomethylcytosine, 5-hydroxymethylcytosine, 7-deazaguanine, 7-deazaadenine, 7-aza-2,6-diaminopurine, 8-aza-7-deazaguanine, 8-aza-7-deazaadenine, 8-aza-7-deaza-2,6-diaminopurine, pseudoisocytidine, N4-ethylcytosine, N2-cyclopentylguanine (cPent-G), N2-cyclopentyl-2-aminopurine (cPent-AP), or N2-propyl-2-aminopurine (Pr-AP). In another embodiment, the modified nucleobase is hypoxanthine, pseudouracil, pseudocytosine, 1-methylpseudouracil, orotic acid, agmatidine, lysidine, 2-thiouracil, 2-thiothymine, 5-halouracil, 5-halomethyluracil, 5-trifluoromethyluracil, 5-propynyluracil, 5-propynylcytosine, 5-aminomethyluracil, 5-hydroxymethyluracil, 5-aminomethylcytosine, or 5-hydroxymethylcytosine.

[0029] An oligonucleotide of the invention comprises or consists of 2′-substituted phosphorothioate monomer, preferably a 2′-substituted phosphorothioate RNA monomer, 2′-substituted phosphate RNA monomer, or 2′-substituted mixed phosphate/phosphorothioate RNA monomers. Such oligonucleotide comprises a 2′-substituted RNA monomer connected through or linked by a phosphorothioate or phosphate backbone linkage, or a mixture thereof, or consists of 2′-substituted phosphorothioate RNA, 2′-substituted phosphate RNA or a mixture thereof. Preferably, such oligonucleotide consists of 2′-substituted phosphorothioate RNA monomers, 2′-substituted phosphate RNA monomers, or a mixture thereof. The 2′-substituted RNA preferably is 2′-F, 2′-O-methyl, or 2′-O-(2-methoxyethyl). The 2′-O-(2-methoxyethyl) moiety is often referred to as 2′-MOE. More preferably, the 2′-substituted RNA monomer is a 2′-O-methyl RNA monomer. Such chemistries are known to the skilled person.

[0030] In a preferred embodiment of this aspect is provided an oligonucleotide according to the invention, wherein said 2′-substituted monomer is a 2′-substituted RNA monomer, a 2′-F monomer, a 2′-amino monomer, a 2′-O-substituted monomer, a 2′-O-methyl monomer, or a 2′-O-(2-methoxyethyl) monomer, preferably a 2′-O-methyl monomer. Preferably, said 2′-substituted monomer is a 2′-substituted RNA monomer, such as a 2′-O-methyl RNA monomer.

[0031] Throughout the application, an oligonucleotide comprising a 2′-O-methyl monomer, or a 2′-O-methyl RNA monomer and a phosphorothioate, phosphate or mixed phosphate/phosphorothioate backbone linkages may be replaced respectively by an oligonucleotide comprising a 2′-O-methyl phosphorothioate RNA, 2′-O-methyl phosphate RNA or 2′-O-methyl phosphate/phosphorothioate RNA. Throughout the application, an oligonucleotide consisting of 2′-O-methyl RNA monomers linked by or connected through phosphorothioate, phosphate or mixed phosphate/phosphorothioate backbone linkages may be replaced by an oligonucleotide consisting of 2′-O-methyl phosphorothioate RNA, 2′-O-methyl phosphate RNA or 2′-O-methyl phosphate/phosphorothioate RNA.

[0032] In addition, an oligonucleotide of the invention comprises a base modification that increases binding affinity to target strands, increases melting temperature of the resulting duplex of said oligonucleotide with its target, and/or decreases immunostimulatory effects, and/or increases biostability, and/or improves biodistribution and/or intra-tissue distribution, and/or cellular uptake and trafficking. In a more preferred embodiment, an oligonucleotide of the invention comprises a 5-methylpyrimidine. A 5-methylpyrimidine is selected from a 5-methylcytosine and/or a 5-methyluracil and/or a thymine, in which thymine is identical to 5-methyluracil. ‘Thymine’ and ‘5-methyluracil’ may be interchanged throughout the document. Preferably, oligonucleotides of the invention comprise at least one of either a 5-methylcytosine base or a 5-methyluracil base. In a preferred embodiment of the invention therefore is provided the oligonucleotide as described above, wherein all cytosine bases are 5-methylcytosine bases, and/or wherein all uracil bases are 5-methyluracil bases. This relates to oligonucleotides that comprise 5-methylcytosine but no unsubstituted cytosine or uracil, to oligonucleotides that comprise 5-methyluracil but no unsubstituted cytosine or uracil, and to oligonucleotides that comprise both 5-methylcytosine and 5-methyluracil but no unsubstituted cytosine or uracil. It also relates to oligonucleotides that comprise 5-methylcytosine but no unsubstituted cytosine yet that comprise unsubstituted uracil, or to oligonucleotides that comprise 5-methyluracil but no unsubstituted uracil, yet that comprise unsubstituted cytosine.

[0033] An oligonucleotide of the invention comprises a scaffold modification that increases binding affinity to target strands, increases melting temperature of the resulting duplex of said oligonucleotide with its target, and/or decreases immunostimulatory effects, and/or increases biostability, and/or improves biodistribution and/or intra-tissue distribution, and/or cellular uptake and trafficking. Encompassed by the invention are those scaffold modifications that result in a bicyclic nucleic acid (BNA) monomer. A bicyclic scaffold is generally a pentose-derived scaffold that has been chemically altered to conformationally restrict the scaffold, leading to the improved effects above. Examples of bicyclic scaffolds are scaffolds where a first cycle such as a pentose cycle forms a spirane with a further cyclic moiety so that both cycles share only one atom, scaffolds where a first cycle such as a pentose cycle is fused to a further cyclic moiety so that both cycles share two adjacent atoms, and scaffolds where a first cycle such as a pentose cycle forms a bridged compound through a moiety that is linked to the first cyclic moiety at two non-adjacent atoms. Such non-adjacent atoms are referred to as bridgehead atoms. Bridged compounds comprise multiple cycles, each of which overlap over at least three atoms. A compound with two cycles wherein those cycles overlap over only two atoms is a fused compound instead. In some bridged compounds, the smallest link between two bridgehead atoms is referred to as the bridging moiety, or as the bridge moiety. In other bridged compounds, when one cycle is a characteristic cycle such as the pentose cycle of a nucleotide, the moiety that is not constitutive to that characteristic cycle is referred to as the bridging moiety. It follows that the nomenclature of bridged bicyclic compounds is context-dependent.

[chemical structure]

[0034] Bicyclic compounds can comprise additional cycles. A bicyclic compound according to the invention is at least bicyclic, and said two cycles constitute a spirane, a fused system, or a bridged system, or a combination thereof. The invention does not encompass scaffold modifications where two independent cycles are linked via a non-cyclic linker, so as to not form a spirane, fused compound, or bridged compound. Preferred bicyclic compounds are fused and bridged compounds. In more preferred embodiments, a bicyclic nucleic acid monomer (BNA) is a bridged nucleic acid monomer. As described herein, both a “bridged” or a “bicylic” nucleic acid monomer relates to a nucleotide with a modified scaffold that enhances the melting temperature of an oligonucleotide against an RNA target as compared to a non-BNA nucleotide-containing control oligonucleotide.

[0035] In a preferred embodiment is provided an oligonucleotide according to the invention, wherein each occurrence of said bicyclic nucleic acid (BNA) scaffold modification results in a monomer that is independently chosen from the group consisting of a conformationally restricted nucleotide (CRN) monomer, a locked nucleic acid (LNA) monomer, a xylo-LNA monomer, an α-LNA monomer, an α-L-LNA monomer, a β-D-LNA monomer, a 2′-amino-LNA monomer, a 2′-(alkylamino)-LNA monomer, a 2′-(acylamino)-LNA monomer, a 2′-N-substituted-2′-amino-LNA monomer, a 2′-thio-LNA monomer, a (2′-O,4′-C) constrained ethyl (cEt) BNA monomer, a (2′-O,4′-C) constrained methoxyethyl (cMOE) BNA monomer, a 2′,4′-BNA^{NC}(N—H) monomer, a 2′,4′-BNA^{NC}(N-Me) monomer, a 2′,4′-BNA^{NC}(N-Bn) monomer, an ethylene-bridged nucleic acid (ENA) monomer, a carba LNA (cLNA) monomer, a 3,4-dihydro-2H-pyran nucleic acid (DpNA) monomer, a 2′-C-bridged bicyclic nucleotide (CBBN) monomer, a heterocyclic-bridged BNA monomer (such as triazolyl or tetrazolyl-linked), an amido-bridged BNA monomer, an urea-bridged BNA monomer, a sulfonamide-bridged BNA monomer, a bicyclic carbocyclic nucleotide monomer, a TriNA monomer, an α-L-TriNA monomer, a bicyclo DNA (bcDNA) monomer, an F-bcDNA monomer, a tricyclo DNA (tcDNA) monomer, an F-tcDNA monomer, an oxetane nucleotide monomer, a locked PMO monomer derived from 2′-amino-LNA, a guanidine-bridged nucleic acid (GuNA) monomer, a spirocyclopropylene-bridged nucleic acid (scpBNA) monomer, and derivatives thereof. It is also encompassed by the invention to introduce more than one distinct scaffold BNA modification in said oligonucleotide. More preferably, each occurrence of said BNA scaffold modification results in a monomer that is independently chosen from the group consisting of a conformationally restrained nucleotide (CRN) monomer, a locked nucleic acid (LNA) monomer, a xylo-LNA monomer, an α-L-LNA monomer, a β-D-LNA monomer, a 2′-amino-LNA monomer, a 2′-(alkylamino)-LNA monomer, a 2′-(acylamino)-LNA monomer, a 2′-N-substituted-2′-amino-LNA monomer, a (2′-O,4′-C) constrained ethyl (cEt) LNA monomer, a (2′-O,4′-C) constrained methoxyethyl (cMOE) BNA monomer, a 2′,4′-BNA^{NC}(N—H) monomer, a 2′,4′-BNA^{NC}(N-Me) monomer, an ethylene-bridged nucleic acid (ENA) monomer, a 2′-C-bridged bicyclic nucleotide (CBBN) monomer, and derivatives thereof. In preferred embodiments, the BNA scaffold modification results in an LNA monomer, an ENA monomer, a cEt BNA monomer, an oxo-CBBN monomer, a 2′-amino-LNA monomer, or a cMOE BNA monomer. In highly preferred embodiments, the BNA scaffold modification results in an LNA monomer, an ENA monomer, a cEt BNA monomer, or a cMOE BNA monomer. Most preferably, the BNA scaffold modification results in an LNA monomer.

[0036] Throughout this application, any monomer comprising a BNA scaffold modification can be replaced by any other monomer comprising a BNA modification, preferably while preserving the nucleobase or modified nucleobase thereof. In other words, the scaffold modifications could be exchanged, while preserving the sequence of the oligonucleotide. As a non-limiting example, an LNA monomer comprising an adenine could be replaced by an ENA monomer comprising an adenine.

[0037] Structural examples of monomers comprising these BNA scaffold modifications are shown below, where B is a base as defined earlier herein, X is a variable such as a heteroatom or a methylene moiety, X₂ is a hydroxyl moiety or another 2′-substitution as defined earlier herein, and L is a backbone linkage as described earlier herein. In the literature, the naming of such modifications is often arbitrary and does not follow a uniform convention—in this application, the names as provided below are intended to refer to the structures provided below. For comparison, the cyclic scaffold of a conventional RNA monomer is shown first. In the structures shown below, monomers are typically depicted as 3′-terminal monomers. When chirality is not indicated, each enantiomer is individually referenced. The invention is not limited to this kind of monomers which are provided for illustrative purposes. Heteroatoms comprised in a cyclic moiety can be substituted by other heteroatoms.

[chemical structure]

[chemical structure]

[0038] The following is a non-exhaustive overview of literature references for BNA scaffold modifications shown above: cEt (2′-O,4′-C constrained ethyl) LNA (doi: 10.1021/ja710342q), cMOE (2′-O,4′-C constrained methoxyethyl) LNA (Seth et al., J. Org. Chem. 2010, 75, 1569-1581), 2′,4′-BNA^{NC}(N—H), 2′,4′-BNA^{NC}(N-Me), ethylene-bridged nucleic acid (ENA) (doi: 10.1093/nass/1.1.241), carba LNA (cLNA) (doi: 10.1021/jo100170g), DpNA (Osawa et al., J. Org. Chem., 2015, 80 (21), pp 10474-10481), 2′-C-bridged bicyclic nucleotide (CBBN, as in e.g. WO 2014/145356 (MiRagen Therapeutics)), heterocyclic-bridged LNA (as in e.g. WO 2014/126229 (Mitsuoka Y et al.)), amido-bridged LNA (as in e.g. Yamamoto et al. Org. Biomol. Chem. 2015, 13, 3757), urea-bridged LNA (as in e.g. Nishida et al. Chem. Commun. 2010, 46, 5283), sulfonamide-bridged LNA (as in e.g. WO 2014/112463 (Obika S et al.)), bicyclic carbocyclic nucleosides (as in e.g. WO 2015/142910 (Ionis Pharmaceuticals)), TriNA (Hanessian et al., J. Org. Chem., 2013, 78 (18), pp 9064-9075), α-L-TriNA, bicyclo DNA (bcDNA) (Bolli et al., Chem Biol. 1996 March; 3(3):197-206), F-bcDNA (DOI: 10.1021/jo402690j), tricyclo DNA (tcDNA) (Murray et al., Nucl. Acids Res., 2012, Vol. 40, No. 13 6135-6143), F-tcDNA (doi: 10.1021/acs.joc.5b00184), an oxetane nucleotide monomer (Nucleic Acids Res. 2004, 32, 5791-5799), scpNA (Horiba et al., J. Org. Chem. 2016, doi: 10.1021/acs.joc.6b02036, GuNA (Shrestha et al., Chem. Commun. 2014, doi: 10.1039/C3CC46017G). For those not mentioned above, reference is made to WO 2011/097641 (ISIS/Ionis Pharmaceuticals) and WO2016/017422 (Osaka University), which are incorporated in their entirety by reference.

[0039] An oligonucleotide of the invention comprising a BNA and a 5-methylcytosine and/or a 5-methyluracil base means that at least one of the scaffolds of said oligonucleotide has been modified by substitution with a BNA, in combination with at least one of the cytosine nucleobases of said oligonucleotide being modified by substitution of the hydrogen at the 5-position of the pyrimidine ring with a methyl group, i.e. a 5-substituted cytosine, and/or that at least one of the uracil nucleobases of said oligonucleotide has been modified by substitution of the proton at the 5-position of the pyrimidine ring with a methyl group (i.e. a 5-methyluracil), respectively. Within the context of the invention, the expression “the substitution of a hydrogen with a methyl group in position 5 of the pyrimidine ring” may be replaced by the expression “the substitution of a pyrimidine with a 5-methylpyrimidine,” with pyrimidine referring to only uracil, only cytosine, or both. If said oligonucleotide comprises 1, 2, 3, 4, 5, 6, 7, 8, 9, or more cytosines and/or uracils, at least one, 2, 3, 4, 5, 6, 7, 8 9, or more cytosines and/or uracils respectively have been modified this way. Preferably all cytosines and/or uracils have been modified this way or substituted by 5-methylcytosine and/or 5-methyluracil respectively. Needless to say, the invention could therefore only be applied to oligonucleotides comprising at least one cytosine or uracil, respectively, in their sequence.

[0040] Preferably, an oligonucleotide according to the invention comprises RNA monomers, as RNA/RNA duplexes are very stable. It is preferred that an RNA oligonucleotide comprises a modification providing the RNA with an additional property, for instance resistance to endonucleases, exonucleases, and RNaseH, additional hybridisation strength, increased stability (for instance in a bodily fluid), increased or decreased flexibility, increased activity, reduced toxicity, increased intracellular transport, increased cellular uptake, tissue-specificity, etc. In addition, the mRNA complexed with the oligonucleotide of the invention is preferably not susceptible to RNaseH cleavage. Preferred modifications have been identified above.

[0041] Accordingly, the invention provides an oligonucleotide comprising a 2′-O-methyl phosphorothioate RNA monomer or consisting of 2′-O-methyl phosphorothioate RNA and comprising a BNA with or without a 5-methylpyrimidine base. Most preferably, this oligonucleotide consists of 2′-O-methyl RNA monomers connected through a phosphorothioate or phosphate backbone and all of its cytosines and/or all of its uracils, independently, have been substituted by 5-methylcytosine and/or 5-methyluracil, respectively, and at least one 2′-O-methyl scaffold has been replaced by a BNA. Thus, an oligonucleotide of the invention may have, in the addition of having at least one BNA scaffold modification:
[0042] At least one and preferably all cytosines substituted with 5-methylcytosines,
[0043] At least one and preferably all cytosines substituted with 5-methylcytosines and at least one uracil substituted with 5-methyluracil,
[0044] At least one uracil substituted with 5-methyluracil.

[0045] In preferred embodiments of this aspect is provided the oligonucleotide as described above, wherein said oligonucleotide comprises 1, 2, 3, 4, 5, or 6 monomers that comprise a bicyclic nucleic acid (BNA) scaffold modification, preferably a bridged nucleic acid scaffold modification.

[0046] In these embodiments, it is preferred that at least one BNA scaffold modification is comprised in a terminal monomer of the oligonucleotide, preferably in the 5′-terminal monomer. It is most preferred that both terminal monomers comprise a BNA scaffold. As such, a more preferred embodiment of this aspect provides the oligonucleotide according to the invention wherein at least one bicyclic nucleic acid (BNA) scaffold modification is comprised in a terminal monomer of said oligonucleotide, preferably in the 5′-terminal monomer of said oligonucleotide, more preferably in both terminal monomers of said oligonucleotide. Other preferred embodiments entail that a terminal monomer and its neighbouring monomer each comprise a BNA scaffold. In such a case, the first two monomers or the last two monomers of an oligonucleotide each comprise a BNA scaffold. This can be combined in any way, so that for example the first and the last two monomers, or the first two and the last monomer all comprise a BNA scaffold. When an oligonucleotide according to the invention comprises a terminal monomer comprising a BNA scaffold, additional monomers with a BNA scaffold are preferably either at the other terminus, or adjacent to terminal monomers with a BNA scaffold.

[0047] A preferred embodiment of this aspect provides the oligonucleotide of the invention, wherein said oligonucleotide comprises BNA modifications as selected from the set consisting of:
[0048] a single BNA scaffold modification in the monomer at the 5′-terminus,
[0049] a single BNA scaffold modification in the monomer at the 3′-terminus,
[0050] two BNA scaffold modifications where one is in the monomer at the 5′-terminus and the other is in the monomer at the 3′-terminus,
[0051] two BNA scaffold modifications, one in each of the two monomers that are closest to the 5′-terminus,
[0052] two BNA scaffold modifications, one in each of the two monomers that are closest to the 3′-terminus,
[0053] three to seven BNA scaffold modifications, where one is in the monomer at the 5′-terminus, one is in the monomer at the 3′-terminus, and 1-5 BNA scaffold modifications are in non-terminal residues,
[0054] three to six BNA scaffold modifications, where one is in the monomer at the 5′-terminus, one is in the monomer at the 3′-terminus, and 1-4 BNA scaffold modifications are in non-terminal residues,
[0055] three to five BNA scaffold modifications, where one is in the monomer at the 5′-terminus, one is in the monomer at the 3′-terminus, and 1-3 BNA scaffold modifications are in non-terminal residues,
[0056] three or four BNA scaffold modifications, where one is in the monomer at the 5′-terminus, one is in the monomer at the 3′-terminus, and one or two BNA scaffold modifications are in non-terminal residues,
[0057] three BNA scaffold modifications, where one is in the monomer at the 5′-terminus, one is in the monomer at the 3′-terminus, and one BNA scaffold modification is in a non-terminal residue,
[0058] four to six BNA scaffold modifications, where one is in the monomer at the 5′-terminus, one is in the monomer at the 3′-terminus, and 2-4 BNA scaffold modifications are in non-terminal residues, and
[0059] four or five BNA scaffold modifications, where one is in the monomer at the 5′-terminus, one is in the monomer at the 3′-terminus, and 2-3 BNA scaffold modifications are in non-terminal residues.

[0060] When an oligonucleotide according to the invention comprises or consists of a sequence represented by SEQ ID NOs: 8, 14, 20, 26, 32, 38, 44, 50, 56, 62, 68, 74, 80, 86, 92, 98, 104, 110, 116, 122, 128, 134, 140, 146, 152, 158, 164, 170, 176, 182, 188, 194, 200, 206, 212, 218, 224, 230, 236, 242, 248, 254, 260, 266, 272, 278, 284, 290, 296, 302, 308, 314, 320, 326, 332, 338, 344, 350, 356, 362, 368, 374, 380, 386, 392, 398, 404, 410, 416, 422, 428, 434, 440, 446, 452, 458, 464, 470, 476, 482, 488, 494, 500, 506, 512, 518, 524, 530, 536, 542, 548, 554, 560, 566, 572, 578, 584, 590, 596, 602, 608, 614, 620, 626, 632, 638, 644, 650, 656, 662, 668, 674, 680, 686, 692, 698, 704, 710, 716, 722, 728, 734, 740, 746, 752, 758, 764, 770, 776, 782, 788, 794, 800, 806, 812, 818, 824, 830, 836, 842, 848, 854, 860, 866, 872, 878, 884, 890, 896, 902, 908, 914, 920, 926, 932, 938, 944, 950, 956, 962, 968, 974, 980, 986, 992, 998, 1004, 1010, 1016, 1022, 1028, 1034, 1040, 1046, 1052, 1058, 1064, 1070, 1076, 1082, 1088, 1094, 1100, 1106, 1112, 1118, 1124, 1130, 1136, 1142, 1148, 1154, 1160, 1166, 1172, 1178, 1184, 1190, 1196, 1202, 1208, 1214, 1220, 1226, 1232, 1238, 1244, 1250, 1256, 1262, 1268, 1274, 1280, 1286, 1292, 1298, 1304, 1310, 1316, 1322, 1328, 1334, 1340, 1346, 1352, 1358, 1364, 1370, 1376, 1382, 1388, 1394, 1400, 1406, 1412, 1418, 1424, 1430, 1436, 1442, 1448, 1454, 1460, 1466, 1472, 1478, 1484, 1490, 1496, 1502, 1508, 1514, 1520, 1526, 1532, 1538, 1544, 1550, 1556, 1562, 1568, 1574, or 1580, preferably at least one BNA scaffold modifications is comprised in said oligonucleotide.

[0061] When an oligonucleotide according to the invention comprises or consists of a sequence represented by SEQ ID NOs: 9, 15, 21, 27, 33, 39, 45, 51, 57, 63, 69, 75, 81, 87, 93, 99, 105, 111, 117, 123, 129, 135, 141, 147, 153, 159, 165, 171, 177, 183, 189, 195, 201, 207, 213, 219, 225, 231, 237, 243, 249, 255, 261, 267, 273, 279, 285, 291, 297, 303, 309, 315, 321, 327, 333, 339, 345, 351, 357, 363, 369, 375, 381, 387, 393, 399, 405, 411, 417, 423, 429, 435, 441, 447, 453, 459, 465, 471, 477, 483, 489, 495, 501, 507, 513, 519, 525, 531, 537, 543, 549, 555, 561, 567, 573, 579, 585, 591, 597, 603, 609, 615, 621, 627, 633, 639, 645, 651, 657, 663, 669, 675, 681, 687, 693, 699, 705, 711, 717, 723, 729, 735, 741, 747, 753, 759, 765, 771, 777, 783, 789, 795, 801, 807, 813, 819, 825, 831, 837, 843, 849, 855, 861, 867, 873, 879, 885, 891, 897, 903, 909, 915, 921, 927, 933, 939, 945, 951, 957, 963, 969, 975, 981, 987, 993, 999, 1005, 1011, 1017, 1023, 1029, 1035, 1041, 1047, 1053, 1059, 1065, 1071, 1077, 1083, 1089, 1095, 1101, 1107, 1113, 1119, 1125, 1131, 1137, 1143, 1149, 1155, 1161, 1167, 1173, 1179, 1185, 1191, 1197, 1203, 1209, 1215, 1221, 1227, 1233, 1239, 1245, 1251, 1257, 1263, 1269, 1275, 1281, 1287, 1293, 1299, 1305, 1311, 1317, 1323, 1329, 1335, 1341, 1347, 1353, 1359, 1365, 1371, 1377, 1383, 1389, 1395, 1401, 1407, 1413, 1419, 1425, 1431, 1437, 1443, 1449, 1455, 1461, 1467, 1473, 1479, 1485, 1491, 1497, 1503, 1509, 1515, 1521, 1527, 1533, 1539, 1545, 1551, 1557, 1563, 1569, or 1575, preferably only the 5′-terminal monomer of said oligonucleotide comprises a BNA scaffold modification.

[0062] When an oligonucleotide according to the invention comprises or consists of a sequence represented by SEQ ID NOs: 10, 16, 22, 28, 34, 40, 46, 52, 58, 64, 70, 76, 82, 88, 94, 100, 106, 112, 118, 124, 130, 136, 142, 148, 154, 160, 166, 172, 178, 184, 190, 196, 202, 208, 214, 220, 226, 232, 238, 244, 250, 256, 262, 268, 274, 280, 286, 292, 298, 304, 310, 316, 322, 328, 334, 340, 346, 352, 358, 364, 370, 376, 382, 388, 394, 400, 406, 412, 418, 424, 430, 436, 442, 448, 454, 460, 466, 472, 478, 484, 490, 496, 502, 508, 514, 520, 526, 532, 538, 544, 550, 556, 562, 568, 574, 580, 586, 592, 598, 604, 610, 616, 622, 628, 634, 640, 646, 652, 658, 664, 670, 676, 682, 688, 694, 700, 706, 712, 718, 724, 730, 736, 742, 748, 754, 760, 766, 772, 778, 784, 790, 796, 802, 808, 814, 820, 826, 832, 838, 844, 850, 856, 862, 868, 874, 880, 886, 892, 898, 904, 910, 916, 922, 928, 934, 940, 946, 952, 958, 964, 970, 976, 982, 988, 994, 1000, 1006, 1012, 1018, 1024, 1030, 1036, 1042, 1048, 1054, 1060, 1066, 1072, 1078, 1084, 1090, 1096, 1102, 1108, 1114, 1120, 1126, 1132, 1138, 1144, 1150, 1156, 1162, 1168, 1174, 1180, 1186, 1192, 1198, 1204, 1210, 1216, 1222, 1228, 1234, 1240, 1246, 1252, 1258, 1264, 1270, 1276, 1282, 1288, 1294, 1300, 1306, 1312, 1318, 1324, 1330, 1336, 1342, 1348, 1354, 1360, 1366, 1372, 1378, 1384, 1390, 1396, 1402, 1408, 1414, 1420, 1426, 1432, 1438, 1444, 1450, 1456, 1462, 1468, 1474, 1480, 1486, 1492, 1498, 1504, 1510, 1516, 1522, 1528, 1534, 1540, 1546, 1552, 1558, 1564, 1570, or 1576, preferably only the 3′-terminal monomer of said oligonucleotide comprises a BNA scaffold modification.

[0063] When an oligonucleotide according to the invention comprises or consists of a sequence represented by SEQ ID NOs: 11, 17, 23, 29, 35, 41, 47, 53, 59, 65, 71, 77, 83, 89, 95, 101, 107, 113, 119, 125, 131, 137, 143, 149, 155, 161, 167, 173, 179, 185, 191, 197, 203, 209, 215, 221, 227, 233, 239, 245, 251, 257, 263, 269, 275, 281, 287, 293, 299, 305, 311, 317, 323, 329, 335, 341, 347, 353, 359, 365, 371, 377, 383, 389, 395, 401, 407, 413, 419, 425, 431, 437, 443, 449, 455, 461, 467, 473, 479, 485, 491, 497, 503, 509, 515, 521, 527, 533, 539, 545, 551, 557, 563, 569, 575, 581, 587, 593, 599, 605, 611, 617, 623, 629, 635, 641, 647, 653, 659, 665, 671, 677, 683, 689, 695, 701, 707, 713, 719, 725, 731, 737, 743, 749, 755, 761, 767, 773, 779, 785, 791, 797, 803, 809, 815, 821, 827, 833, 839, 845, 851, 857, 863, 869, 875, 881, 887, 893, 899, 905, 911, 917, 923, 929, 935, 941, 947, 953, 959, 965, 971, 977, 983, 989, 995, 1001, 1007, 1013, 1019, 1025, 1031, 1037, 1043, 1049, 1055, 1061, 1067, 1073, 1079, 1085, 1091, 1097, 1103, 1109, 1115, 1121, 1127, 1133, 1139, 1145, 1151, 1157, 1163, 1169, 1175, 1181, 1187, 1193, 1199, 1205, 1211, 1217, 1223, 1229, 1235, 1241, 1247, 1253, 1259, 1265, 1271, 1277, 1283, 1289, 1295, 1301, 1307, 1313, 1319, 1325, 1331, 1337, 1343, 1349, 1355, 1361, 1367, 1373, 1379, 1385, 1391, 1397, 1403, 1409, 1415, 1421, 1427, 1433, 1439, 1445, 1451, 1457, 1463, 1469, 1475, 1481, 1487, 1493, 1499, 1505, 1511, 1517, 1523, 1529, 1535, 1541, 1547, 1553, 1559, 1565, 1571, or 1577, preferably only both the 5′-terminal monomer and the 3′-terminal monomer of said oligonucleotide comprise a BNA scaffold modification.

[0064] When an oligonucleotide according to the invention comprises or consists of a sequence represented by SEQ ID NOs: 12, 18, 24, 30, 36, 42, 48, 54, 60, 66, 72, 78, 84, 90, 96, 102, 108, 114, 120, 126, 132, 138, 144, 150, 156, 162, 168, 174, 180, 186, 192, 198, 204, 210, 216, 222, 228, 234, 240, 246, 252, 258, 264, 270, 276, 282, 288, 294, 300, 306, 312, 318, 324, 330, 336, 342, 348, 354, 360, 366, 372, 378, 384, 390, 396, 402, 408, 414, 420, 426, 432, 438, 444, 450, 456, 462, 468, 474, 480, 486, 492, 498, 504, 510, 516, 522, 528, 534, 540, 546, 552, 558, 564, 570, 576, 582, 588, 594, 600, 606, 612, 618, 624, 630, 636, 642, 648, 654, 660, 666, 672, 678, 684, 690, 696, 702, 708, 714, 720, 726, 732, 738, 744, 750, 756, 762, 768, 774, 780, 786, 792, 798, 804, 810, 816, 822, 828, 834, 840, 846, 852, 858, 864, 870, 876, 882, 888, 894, 900, 906, 912, 918, 924, 930, 936, 942, 948, 954, 960, 966, 972, 978, 984, 990, 996, 1002, 1008, 1014, 1020, 1026, 1032, 1038, 1044, 1050, 1056, 1062, 1068, 1074, 1080, 1086, 1092, 1098, 1104, 1110, 1116, 1122, 1128, 1134, 1140, 1146, 1152, 1158, 1164, 1170, 1176, 1182, 1188, 1194, 1200, 1206, 1212, 1218, 1224, 1230, 1236, 1242, 1248, 1254, 1260, 1266, 1272, 1278, 1284, 1290, 1296, 1302, 1308, 1314, 1320, 1326, 1332, 1338, 1344, 1350, 1356, 1362, 1368, 1374, 1380, 1386, 1392, 1398, 1404, 1410, 1416, 1422, 1428, 1434, 1440, 1446, 1452, 1458, 1464, 1470, 1476, 1482, 1488, 1494, 1500, 1506, 1512, 1518, 1524, 1530, 1536, 1542, 1548, 1554, 1560, 1566, 1572, or 1578, preferably only the two most 5′-terminal monomers of said oligonucleotide both comprise a BNA scaffold modification.

[0065] When an oligonucleotide according to the invention comprises or consists of a sequence represented by SEQ ID NOs: 13, 19, 25, 31, 37, 43, 49, 55, 61, 67, 73, 79, 85, 91, 97, 103, 109, 115, 121, 127, 133, 139, 145, 151, 157, 163, 169, 175, 181, 187, 193, 199, 205, 211, 217, 223, 229, 235, 241, 247, 253, 259, 265, 271, 277, 283, 289, 295, 301, 307, 313, 319, 325, 331, 337, 343, 349, 355, 361, 367, 373, 379, 385, 391, 397, 403, 409, 415, 421, 427, 433, 439, 445, 451, 457, 463, 469, 475, 481, 487, 493, 499, 505, 511, 517, 523, 529, 535, 541, 547, 553, 559, 565, 571, 577, 583, 589, 595, 601, 607, 613, 619, 625, 631, 637, 643, 649, 655, 661, 667, 673, 679, 685, 691, 697, 703, 709, 715, 721, 727, 733, 739, 745, 751, 757, 763, 769, 775, 781, 787, 793, 799, 805, 811, 817, 823, 829, 835, 841, 847, 853, 859, 865, 871, 877, 883, 889, 895, 901, 907, 913, 919, 925, 931, 937, 943, 949, 955, 961, 967, 973, 979, 985, 991, 997, 1003, 1009, 1015, 1021, 1027, 1033, 1039, 1045, 1051, 1057, 1063, 1069, 1075, 1081, 1087, 1093, 1099, 1105, 1111, 1117, 1123, 1129, 1135, 1141, 1147, 1153, 1159, 1165, 1171, 1177, 1183, 1189, 1195, 1201, 1207, 1213, 1219, 1225, 1231, 1237, 1243, 1249, 1255, 1261, 1267, 1273, 1279, 1285, 1291, 1297, 1303, 1309, 1315, 1321, 1327, 1333, 1339, 1345, 1351, 1357, 1363, 1369, 1375, 1381, 1387, 1393, 1399, 1405, 1411, 1417, 1423, 1429, 1435, 1441, 1447, 1453, 1459, 1465, 1471, 1477, 1483, 1489, 1495, 1501, 1507, 1513, 1519, 1525, 1531, 1537, 1543, 1549, 1555, 1561, 1567, 1573, or 1579, preferably only the two most 3′-terminal monomers of said oligonucleotide both comprise a BNA scaffold modification.

[0066] When an oligonucleotide according to the invention comprises or consists of a sequence represented by a SEQ ID NO that is not SEQ ID NO: 1580, said oligonucleotide preferably comprises 5-methylcytosines instead of cytosines, and said oligonucleotide preferably comprises at least one 2′-O-methyl phosphorothioate monomer, more preferably comprises only 2′-O-methyl phosphorothioate monomers. When an oligonucleotide according to the invention comprises or consists of a sequence represented by SEQ ID NO: 1580, said oligonucleotide preferably comprises cytosines instead of 5-methylcytosines, and said oligonucleotide preferably comprises at least one 2′-O-methyl phosphorothioate monomer, more preferably comprises only 2′-O-methyl phosphorothioate monomers. Whenever a SEQ ID NO references T or U and said monomer comprises a BNA scaffold modification, said monomer (i.e. said reference) can optionally be replaced by U or T, respectively. Whenever a SEQ ID NO references C or 5-methyl-C and said monomer comprises a BNA scaffold modification, said reference can optionally be replaced by 5-methyl-C or C, respectively.

[0067] Throughout this application, a BNA scaffold modification can always be comprised in an oligonucleotide unless explicitly stated otherwise. However, for the sake of legibility, this is not always explicitly spelt out. This means that whenever an oligonucleotide is said to comprise or consist of only a particular kind of monomer, this does not exclude the presence of BNA scaffold modifications in cases where a BNA scaffold modification is mentioned as being present. For example, an oligonucleotide that consists of only 2′-O-methyl RNA monomers can nonetheless comprise a monomer with a BNA scaffold modification. This will be apparent from context (for example, when an AON is said to consist exclusively of one monomer, yet still also comprise a BNA scaffold modification.)

[0068] In preferred embodiments of this aspect is provided the oligonucleotide according to the invention, wherein said oligonucleotide is complementary, preferably reverse complementary to or binds to or targets or hybridizes with at least a part of an exon and/or non-exon region, preferably wherein said oligonucleotide comprises or consists of a sequence which is complementary to or binds or targets or hybridizes at least a part of an exon recognition sequence (ERS), an exonic splicing silencer (ESS), an intronic splicing silencer (ISS), an SR protein binding site, or another splicing element, signal, or structure. When such an oligonucleotide is complementary, it is understood that it can also be reverse complementary. In this application, the term “complementary” encompasses both forward complementary and reverse complementary sequences, as will be apparent to a skilled person from the context.

[0069] In this context, preferred sequences to which the oligonucleotide according to the invention is complementary, or to which it binds, or which it targets, or which it hybridizes with, are dystrophin exons, such as dystrophin pre-mRNA exons 2 to 78. Preferred dystrophin exons are exons 2 to 78, more preferably exons 10 to 60, most preferably exons 44 to 55 and preferred non-exon regions are introns 1 to 78. More preferred exons to which the oligonucleotide is complementary, or to which it binds, or which it targets, or with which it hybridizes, are dystrophin pre-mRNA exons 44, 45, 51, 52, 53 and 55. Preferred exons to which the oligonucleotide is complementary, or to which it binds, or which it targets, or with which it hybridizes, are dystrophin pre-mRNA exons 44, 45, 51, 52, 53 and 55. Most preferably, such an oligonucleotide hybridizes with at least a part of a dystrophin pre-mRNA exon chosen from exons 44, 45, 51, 52, 53 and 55, and has a length of 10 to 33 nucleotides, more preferably of 16 to 22 nucleotides. Accordingly, in a preferred embodiment is provided an oligonucleotide according to the invention wherein said oligonucleotide is complementary, preferably reverse complementary to at least part of an exon and/or non-exon region, wherein said at least part of an exon and/or non-exon region has a length of 10 to 33 nucleotides, preferably of 16 to 22 nucleotides. More preferably, said at least part of an exon and/or non-exon region has a length of at least 10, 11, 12, 13, 14, 15, 16, 17, 18, 19, 20, 21, 22, 23, 24, 25, 26, 27, 28, 29, 30, 31, 32, or 33 nucleotides. Accordingly, it is preferred that said at least part of an exon and/or non-exon region has a length of at most 33, 32, 31, 30, 29, 28, 27, 26, 25, 24, 23, 22, 21, 20, 19, 18, 17, 16, 15, 14, 13, 12, 11, or 10 nucleotides. Most preferred lengths are 16, 17, 18, 19, 20, 21, or 22 nucleotides.

[0070] Additionally, in this context, other preferred sequences to which the oligonucleotide according to the invention is complementary, or to which it binds, or which it targets, or which it hybridizes with, are SMN2 splicing regulatory elements, preferably such as those in introns 6 and 7, more preferably such as the splicing silencer ISS-N1 in intron 7.

[0071] Accordingly, in a preferred embodiment is provided an oligonucleotide according to the invention, wherein said exon and/or non-exon region is in a DMD gene or in an SMN gene. An SMN gene can be an SMN1 gene or an SMN2 gene, preferably an SMN2 gene.

[0072] Preferably, an oligonucleotide of the invention is represented by a nucleotide sequence comprising or consisting of a sequence that is capable of binding to, targeting or being complementary to a part of an exon of dystrophin pre-mRNA. Said binding or targeted part may be at least 50% of the length of the oligonucleotide of the invention, or at least 60%, or at least 70%, or at least 80%, or at least 90% or at least 95%, or 98% and up to 100%. An oligonucleotide may be represented by a nucleotide sequence, said nucleotide sequence comprising a sequence that binds, targets, or is complementary to at least a part of dystrophin pre-mRNA as defined herein and additional flanking sequences. In a more preferred embodiment, the length of said binding or targeted part of said oligonucleotide is of at least 10, 11, 12, 13, 14, 15, 16, 17, 18, 19, 20, 21, 22, 23, 24, 25, 26, 27, 28, 29, 30, 31, 32, or33 nucleotides. Several types of flanking sequences may be used. Preferably, flanking sequences are used to modify the binding of a protein to said oligonucleotide, or to modify a thermodynamic property of said oligonucleotide, more preferably to modify target RNA binding affinity. In another preferred embodiment, additional flanking sequences are complementary to sequences of the dystrophin pre-mRNA which are not present in said exon. Such flanking sequences are preferably capable of binding to or targeting sequences comprising or consisting of the branchpoint and/or the splice site acceptor or donor consensus sequences of said exon. In a preferred embodiment, such flanking sequences are capable of binding to or targeting sequences comprising or consisting of sequences of an intron of the dystrophin pre-mRNA which is adjacent to said exon.

[0073] Preferred oligonucleotides according to the invention are those wherein said oligonucleotide is represented by a nucleotide sequence comprising or consisting of SEQ ID NO: 8-1580 or SEQ ID NO: 1592-1607, or by a nucleotide sequence comprising or consisting of a fragment of SEQ ID NO: 8-1580 or SEQ ID NO: 1592-1607, preferably wherein said oligonucleotide is represented by a nucleotide sequence comprising or consisting of SEQ ID NO:453-613 or SEQ ID NO: 1592-1605 or SEQ ID NO: 1607, or by a nucleotide sequence comprising or consisting of a fragment of SEQ ID NO: 453-613 or SEQ ID NO 1592-1605 or SEQ ID NO: 1607, more preferably wherein said oligonucleotide is represented by a nucleotide sequence comprising or consisting of SEQ ID NO: 453, 455, 456, 459, 461, 462, 465, 467, 468, 471, 473, 474, 486, 483, 1592, 1593, 1594, 1595, 1596, 1597, 1598, 1599, 1600, 1601, 1602, 1603, 1604, 1605, or 1607 or by a nucleotide sequence comprising or consisting of a fragment of SEQ ID NO: 453, 455, 456, 459, 461, 462, 465, 467, 468, 471, 473, 474, 486, 483 1592, 1593, 1594, 1595, 1596, 1597, 1598, 1599, 1600, 1601, 1602, 1603, 1604, 1605, or 1607. Within the context of the invention, a fragment of a SEQ ID NO preferably means a nucleotide sequence comprising or consisting of at least 10 contiguous nucleotides from said SEQ ID NO.

[0074] More preferred oligonucleotides according to the invention are those wherein said oligonucleotide is represented by a nucleotide sequence comprising or consisting of SEQ ID NO: 8-1580 or SEQ ID NO: 1592-2099 or SEQ ID NO: 3000-6048, or by a nucleotide sequence comprising or consisting of a fragment of SEQ ID NO: 8-1580 or SEQ ID NO: 1592-2099 or SEQ ID NO: 3000-6048, more preferably wherein said oligonucleotide is represented by a nucleotide sequence comprising or consisting of SEQ ID NOs: 455, 459, 4528, 4531, 4532, 4533, 4535, 4542, 4548, or 4568, or by a nucleotide sequence comprising or consisting of a fragment of SEQ ID NOs: 455, 459, 4528, 4531, 4532, 4533, 4535, 4542, 4548, or 4568.

[0075] More preferred oligonucleotides according to the invention are those wherein said oligonucleotide is represented by a nucleotide sequence comprising or consisting of SEQ ID NO: 8-1580 or SEQ ID NO: 1592-2099 or SEQ ID NO: 3000-6048, or by a nucleotide sequence comprising or consisting of a fragment of SEQ ID NO: 8-1580 or SEQ ID NO: 1592-2099 or SEQ ID NO: 3000-6048, preferably wherein said oligonucleotide is represented by a nucleotide sequence comprising or consisting of SEQ ID NO: 453, 455, 456, 459, 461, 462, 465, 467, 468, 471, 473, 474, 483, or 486, or by a nucleotide sequence comprising or consisting of a fragment of SEQ ID NO: 453, 455, 456, 459, 461, 462, 465, 467, 468, 471, 473, 474, 483, or 486, more preferably wherein said oligonucleotide is represented by a nucleotide sequence comprising or consisting of SEQ ID NO: 452-613, 4528-4572, or by a nucleotide sequence comprising or consisting of a fragment of SEQ ID NO: 452-613, 4528-4572, most preferably wherein said oligonucleotide is represented by a nucleotide sequence comprising or consisting of SEQ ID NO: 455, 459, 4528, 4531, 4532, 4533, 4535, 4542, 4548, or 4568, or by a nucleotide sequence comprising or consisting of a fragment of SEQ ID NO: 455, 459, 4528, 4531, 4532, 4533, 4535, 4542, 4548, or 4568.

[0076] Preferred AONs are those wherein said oligonucleotide induces pre-mRNA splicing modulation, preferably said pre-mRNA splicing modulation alters production or composition of protein, which preferably comprises exon skipping or exon inclusion, wherein said pre-mRNA splicing modulation most preferably comprises exon skipping. This pre-mRNA splicing modulation is preferably used in the context of a therapeutic application as later defined herein.

[0077] The objective of pre-mRNA splicing modulation can be to alter production of protein, most often the protein the RNA codes for. This production can be altered through increase or decrease of the level of said production. This production can also be altered through alteration of the composition of the protein that is actually produced, for example when pre-mRNA splicing modulation results in inclusion or exclusion of one or more exons, and in a protein that has a different amino acid sequence. Preferably, such a protein with a different amino acid sequence has more functionality, or has a better functionality, or has at least one altered property, than the protein that is produced as a result of the disease or condition.

[0078] In the case of DMD, pre-mRNA splicing modulation can be applied to skip one or more specific exons in the dystrophin pre-mRNA in order to restore the open reading frame of the transcript and to induce the expression of a shorter but (more) functional dystrophin protein, with the ultimate goal to be able to interfere with the course of the disease. Similar strategies allow interference with the course of BMD. In the case of SMA pre-mRNA splicing modulation can be applied to enhance inclusion of exon 7 in the SMN2 gene and to increase levels of the survival of motor neuron protein, which decreases loss of motor neurons in the spinal cord and subsequent atrophy of voluntary muscles. As such, in a preferred embodiment is provided an oligonucleotide according to the invention, wherein said oligonucleotide induces pre-mRNA splicing modulation, wherein said pre-mRNA splicing modulation alters production of protein that is related to a disease or a condition, preferably wherein said disease or condition is Duchenne Muscular Dystrophy (DMD), Becker Muscular Dystrophy (BMD), or Spinal Muscular Atrophy (SMA).

[0079] Preferably, an AON is for use in the splicing modulation of a therapeutic pre-mRNA. An AON is preferably an oligonucleotide which is complementary to a specific sequence of the dystrophin or SMN2 pre-mRNA derived from the coding strand of a DNA of an individual. This oligonucleotide binds to or targets said sequence of said pre-mRNA. In the context of the invention, a therapeutic pre-mRNA may be called a diseased pre-mRNA of a gene involved in a genetic disease. Modulation of the splicing of a therapeutic pre-mRNA therefore allows the treatment of said genetic disease.

[0080] In the case of DMD or of BMD, pre-mRNA splicing modulation can be applied to skip one or more specific exons in the dystrophin pre-mRNA in order to restore the open reading frame of the transcript and to induce the expression of a shorter but (more) functional dystrophin protein, with the ultimate goal to be able to delay or even stop progression of the disease.

[0081] In a preferred embodiment, an oligonucleotide of the invention is used for inducing exon-skipping in the dystrophin pre-mRNA in a cell, in an organ, in a tissue and/or in an individual. Exon-skipping results in a mature dystrophin mRNA that does not contain a skipped exon and thus, when said exon codes for amino acids, can lead to the expression of a shorter protein product. The skipping of at least one exon is preferably induced by the binding of an AON to specific exon-internal sequences comprising splicing regulatory elements, the splice sites and/or intronic branchpoint sequences.

[0082] In a preferred embodiment, the invention also encompasses oligonucleotides as described above that are suitable for the skipping of multiple exons, sometimes referred to as multiskipping. Such an oligonucleotide according to the invention is capable of binding to a region of a first exon and to a region of a second exon within the same pre-mRNA, wherein said region of said second exon has at least 50% identity with said region of said first exon. These oligonucleotides are preferably capable of inducing the skipping of said first exon and said second exon of said pre-mRNA. Preferably, the skipping of additional exon(s) is also induced, wherein said additional exon(s) is/are preferably located in between said first and said second exon. The resulting transcript of said pre-mRNA, wherein said exons are skipped, is in-frame. More details of such oligonucleotides are provided in WO2014007620.

[0083] As defined herein a DMD pre-mRNA preferably means a pre-mRNA of a DMD gene coding for a dystrophin protein. A mutated DMD pre-mRNA corresponds to a pre-mRNA of a BMD or DMD patient with a mutation when compared to a wild type DMD pre-mRNA of a non-affected person, resulting in (reduced levels of) an aberrant protein (BMD), or in the absence of functional dystrophin (DMD). A DMD pre-mRNA is also named a dystrophin pre-mRNA. A DMD gene may also be named a dystrophin gene. Dystrophin and DMD may be used interchangeably throughout the application.

[0084] A patient is preferably intended to mean a patient having DMD or BMD as later defined herein or a patient susceptible to develop DMD or BMD due to his or her genetic background. In the case of a DMD patient, an oligonucleotide used will preferably correct one mutation as present in the DMD gene of said patient and create a protein that will look like a BMD protein: said protein will preferably be a functional or semi-functional dystrophin as later defined herein. In the case of a BMD patient, an oligonucleotide as used will preferably correct one mutation as present in the BMD gene of said patient and create a dystrophin which will be more functional than the dystrophin which was originally present in said BMD patient.

[0085] As defined herein, a functional dystrophin is preferably a wild type dystrophin corresponding to a protein having the amino acid sequence as identified in SEQ ID NO: 1. As defined herein, a semi-functional dystrophin is preferably a BMD-like dystrophin corresponding to a protein having an acting binding domain in its N terminal part (first 240 amino acids at the N terminus), a cysteine-rich domain (amino acid 3361 till 3685) and a C terminal domain (last 325 amino acids at the C terminus) each of these domains being present in a wild type dystrophin as known to the skilled person. The amino acids indicated herein correspond to amino acids of the wild type dystrophin being represented by SEQ ID NO:1. In other words, a functional or a semi-functional dystrophin is a dystrophin which exhibits at least to some extent an activity of a wild type dystrophin. “At least to some extent” preferably means at least 10%, 20%, 30%, 40%, 50%, 60%, 70%, 80%, 90%, 95% or 100% of a corresponding activity of a wild type functional dystrophin. In this context, an activity of a functional dystrophin is preferably binding to actin and to the dystrophin-associated glycoprotein complex (DGC or DAPC) (Ehmsen J et al, 2002).

[0086] Binding of dystrophin to actin and to the DGC or DAPC complex may be visualized by either co-immunoprecipitation using total protein extracts or immunofluorescence analysis of cross-sections using various antibodies reacting with the different members of the complex, from a control (non-DMD) biopsy of one from a muscle suspected to be dystrophic, pre- and/or post-treatment, as known to the skilled person.

[0087] Individuals or patients suffering from Duchenne muscular dystrophy typically have a mutation in the gene encoding dystrophin (the DMD or dystrophin gene) that prevents synthesis of the complete protein, i.e. a premature stop codon prevents the synthesis of the C-terminus. In Becker muscular dystrophy the dystrophin gene also comprises a mutation compared to the wild type but the mutation does typically not result in a premature stop codon and the C-terminus is typically synthesized. As a result a functional or semi-functional dystrophin protein is synthesized that has at least the same activity in kind as the wild type protein, although not necessarily the same amount of activity. The genome of a BMD patient typically encodes a dystrophin protein comprising the N terminal part (first 240 amino acids at the N terminus), a cysteine-rich domain (amino acid 3361 till 3685) and a C-terminal domain (last 325 amino acids at the C-terminus) but in the majority of cases its central rod shaped domain is shorter than the one of a wild type dystrophin (Monaco et al., 1988). Antisense oligonucleotide-induced exon skipping for the treatment of DMD is typically directed to overcome a premature stop in the pre-mRNA by skipping an exon, preferably in the central rod-domain shaped domain, to correct the open reading frame and allow synthesis of remainder of the dystrophin protein including the C-terminus, albeit that the protein is somewhat smaller as a result of a smaller rod domain. In a preferred embodiment, an individual having DMD and being treated by an oligonucleotide as defined herein will be provided a dystrophin which exhibits at least to some extent an activity of a wild type dystrophin. More preferably, if said individual is a Duchenne patient or is suspected to be a Duchenne patient, a functional or a semi-functional dystrophin is a dystrophin of an individual having BMD: typically said dystrophin is able to interact with both actin and the DGC or DAPC, but its central rod shaped domain may be shorter than the one of a wild type dystrophin (Monaco et al., 1988). The central rod domain of wild type dystrophin comprises 24 spectrin-like repeats. For example, a central rod shaped domain of a dystrophin as provided herein may comprise 5 to 23, 10 to 22 or 12 to 18 spectrin-like repeats as long as it can bind to actin and to DGC.

[0088] Alleviating one or more symptom(s) of Duchenne Muscular Dystrophy or Becker Muscular Dystrophy in an individual using an oligonucleotide of the invention may be assessed by any of the following assays: prolongation of time to loss of walking, improvement of muscle strength, improvement of the ability to lift weight, improvement of the time taken to rise from the floor, improvement in the nine-meter walking time, improvement in the time taken for four-stairs climbing, improvement of the leg function grade, improvement of the pulmonary function, improvement of cardiac function, improvement of the quality of life. Each of these assays is known to the skilled person. As an example, the publication of Manzur et al. (2008), gives an extensive explanation of each of these assays. For each of these assays, as soon as a detectable improvement or prolongation of a parameter measured in an assay has been found, it will preferably mean that one or more symptoms of Duchenne Muscular Dystrophy or Becker Muscular Dystrophy has been alleviated in an individual using an oligonucleotide of the invention. Detectable improvement or prolongation is preferably a statistically significant improvement or prolongation as described in Hodgetts et al. (2006). Alternatively, the alleviation of one or more symptom(s) of Duchenne Muscular Dystrophy or Becker Muscular Dystrophy may be assessed by measuring an improvement of a muscle fiber function, integrity and/or survival. In a preferred method, one or more symptom(s) of a DMD or a BMD patient is/are alleviated and/or one or more characteristic(s) of one or more muscle cells from a DMD or a BMD patient is/are improved. Such symptoms or characteristics may be assessed at the cellular, tissue level or on the patient self.

[0089] An alleviation of one or more characteristics of a muscle cell from a patient may be assessed by any of the following assays on a myogenic cell or muscle cell from a patient: reduced calcium uptake by muscle cells, decreased collagen synthesis, altered morphology, altered lipid biosynthesis, decreased oxidative stress, and/or improved muscle fiber function, integrity, and/or survival. These parameters are usually assessed using immunofluorescence and/or histochemical analyses of cross sections of muscle biopsies.

[0090] The improvement of muscle fiber function, integrity and/or survival may be assessed using at least one of the following assays: a detectable decrease of creatine kinase in blood, a detectable decrease of necrosis of muscle fibers in a biopsy cross-section of a muscle suspected to be dystrophic, and/or a detectable increase of the homogeneity of the diameter of muscle fibers in a biopsy cross-section of a muscle suspected to be dystrophic. Each of these assays is known to the skilled person.

[0091] Creatine kinase may be detected in blood as described in Hodgetts et al. (2006). A detectable decrease in creatine kinase may mean a decrease of 5%, 10%, 20%, 30%, 40%, 50%, 60%, 70%, 80%, 90% or more compared to the concentration of creatine kinase in a same DMD or BMD patient before treatment.

[0092] A detectable decrease of necrosis of muscle fibers is preferably assessed in a muscle biopsy, more preferably as described in Hodgetts et al. (2006), using biopsy cross-sections. A detectable decrease of necrosis may be a decrease of 5%, 10%, 20%, 30%, 40%, 50%, 60%, 70%, 80%, 90% or more of the area wherein necrosis has been identified using biopsy cross-sections. The decrease is measured by comparison to the necrosis as assessed in a same DMD or BMD patient before treatment.

[0093] A detectable increase of the homogeneity of the diameter of a muscle fiber is preferably assessed in a muscle biopsy cross-section, more preferably as described in Hodgetts et al. (2006). The increase is measured by comparison to the homogeneity of the diameter of a muscle fiber in a same DMD or BMD patient before treatment.

[0094] Preferably, an oligonucleotide of the invention provides said individual with a functional or a semi-functional dystrophin protein (typically in the case of DMD) and is able to, for at least in part decrease the production of an aberrant dystrophin protein in said individual (typically in the case of BMD).

[0095] Decreasing the production of an aberrant dystrophin mRNA, or aberrant dystrophin protein, preferably means that 90%, 80%, 70%, 60%, 50%, 40%, 30%, 20%, 10%, 5% or less of the initial amount of aberrant dystrophin mRNA, or aberrant dystrophin protein, is still detectable by RT-PCR (mRNA) or immunofluorescence or western blot analysis (protein). An aberrant dystrophin mRNA or protein is also referred to herein as a less functional (compared to a wild type functional dystrophin protein as earlier defined herein) or a non-functional dystrophin mRNA or protein. A non-functional dystrophin protein is preferably a dystrophin protein which is not able to bind actin and/or members of the DGC protein complex. A non-functional dystrophin protein or dystrophin mRNA does typically not have, or does not encode a dystrophin protein with an intact C-terminus of the protein. The detection of a functional or semi-functional dystrophin mRNA or protein may be done as for an aberrant dystrophin mRNA or protein.

[0096] Once a DMD patient is provided with a functional or a semi-functional dystrophin protein, at least part of the cause of DMD is taken away. Hence, it would then be expected that the symptoms of DMD are at least partly alleviated, or that the rate with which the symptoms worsen is decreased, resulting in a slower decline. The enhanced skipping frequency also increases the level of functional or a semi-functional dystrophin protein produced in a muscle cell of a DMD or BMD individual.

[0097] Spinal muscle atrophy (SMA) is a genetic disorder, often fatal, which results from the loss of the SMN protein encoded by the Survival Motor Neuron SMN gene. The SMN genes, SMN1 and SMN2, are located on chromosome 5 and SMA is caused by the loss of SMN1 from both chromosomes. SMN2, while it is almost identical to SMN1, is less effective at providing the SMN protein. SMN1 encodes a ubiquitously expressed 38 kDa SMN protein that is necessary for snRNP assembly, an essential process for cell survival. SMN1 and SMN2 differ by a critical C to T mutation at position 6 of exon 7 (C6U in the transcript of SMN2). C6U does not change the coding sequence, but is sufficient to cause exon 7 skipping in SMN2. This leads to an unstable truncated protein, SMNΔ7. The severity of SMA is affected by the efficiency with which SMN2, of which there are several copies, produces its SMN protein. In SMA patients, SMN2 generally fails to compensate for the loss of SMN1 because of exon 7 skipping, producing the unstable truncated protein, SMNΔ7, which cannot ensure cell survival. At present, available treatment for SMA consists of prevention and management of the secondary effect of chronic motor unit loss. There are no drug therapies available for the treatment or prevention of SMA. Antisense technology for splice switching can be used to provide new therapeutics for SMA treatment. Effective agents can alter splicing of SMN2 pre-mRNAs and are likely to be therapeutically useful. Another molecular basis of SMA can be the point mutation (E134K).

[0098] Preferred AONs enhance the level of exon 7-containing SMN2 mRNA relative to exon 7-deleted SMN2 mRNA in a cell. Preferred AONs are preferably of adequate length and complementarity (more preferably as defined later herein) so that the AONs specifically hybridize to a region within the SMN2 gene, such that the level of exon 7-containing SMN2 mRNA relative to exon-deleted SMN2 mRNA in the cell is enhanced. Preferred AONs comprise or consist of SEQ ID NO: 1400-1579. A more preferred AON comprises or consists of SEQ ID NO: 1490. In the case of SMA, pre-mRNA splicing modulation can be applied to include one or more exons, preferably exon 7, in the SMN2 pre-mRNA in order to increase functional SMN2 levels by increasing expression of exon 7-containing SMN2 mRNA or protein. This has the ultimate goal to be able to delay or even stop progression of the disease.

[0099] In a preferred embodiment, an AON is used for inducing exon 7-inclusion in an SMN pre-mRNA, preferably the SMN2 pre-mRNA, in a cell, in an organ, in a tissue and/or in an individual. Exon-inclusion preferably results in a mature SMN mRNA that contains an otherwise skipped exon 7 and thus can lead to the expression of a more functional protein product. The inclusion of at least one exon, preferably exon 7, is preferably induced by the binding of an AON to specific sequences, preferably intron-internal sequences, comprising splicing regulatory elements, splice sites, and/or intronic branchpoint sequences.

[0100] As defined herein an SMN1 pre-mRNA preferably means a pre-mRNA of an SMN1 gene coding for an SMN protein. As defined herein an SMN2 pre-mRNA preferably means a pre-mRNA of an SMN2 gene coding for an SMN protein. In cases where the pre-mRNA of subjects suffering SMA is discussed, an SMN2 pre-mRNA is sometimes also named an SMN pre-mRNA; this is because in SMA patients no SMN1 gene is present, and thus all SMN pre-mRNA is SMN2 pre-mRNA. An SMN2 gene may also be named an SMN gene in such a case.

[0101] A patient is preferably intended to mean a patient having SMA as defined herein or a patient susceptible to develop SMA due to his or her genetic background. In the case of an SMA patient, an oligonucleotide used will preferably promote inclusion of exon 7 as present in the SMN2 gene of said patient and create a functional SMN protein and not an SMNΔ7 protein: said protein will preferably be a functional or semi-functional SMN as later defined herein. In the case of an SMA patient, an oligonucleotide as used will preferably suppress or reduce the effect of one mutation as present in the SMN2 gene of said patient and create increased levels of an SMN protein which will be more functional than the SMN protein, often the SMNΔ7 protein, which was originally present in said SMA patient. Preferably, the ratio of SMN protein to SMNΔ7 protein shifts in favour of the functional SMN protein. Preferred molar ratios of SMN protein to SMNΔ7 protein that are detected after treatment are 5:4, 5:3, 5:2, 5:1, or 10:1. Most preferably, SMNΔ7 protein can no longer be detected, or only in trace amounts.

[0102] As defined herein, a functional SMN protein is preferably a wild type SMN corresponding to a protein having the amino acid sequence as identified in SEQ ID NO: 1581. Preferably, a functional SMN protein comprises exon 7. This exon 7 is identified in SEQ ID NO: 1584. In other words, a functional or a semi-functional SMN protein is an SMN protein which exhibits at least to some extent an activity of a wild type SMN protein. “At least to some extent” preferably means at least 10%, 20%, 30%, 40%, 50%, 60%, 70%, 80%, 90%, 95% or 100% of a corresponding activity of a wild type functional SMN protein. In this context, preferred activities of a functional SMN protein relate to telomerase regeneration, to transcriptional regulation, and to cellular trafficking, as known to a skilled person. More preferred activities of a functional SMN protein are the formation of functional snRNP assemblies, and the interaction with Sm proteins (Smith proteins).

[0103] Functional SMN binds to the Arg and Gly-rich C-terminal tails of the Sm D1 and D3 proteins (Selenko et al., 2001). In vitro binding assays can be performed to study this interaction, for example through expression of C-terminal tails of Sm D1 and Sm D3 as glutathione-S-transferase (GST) fusion proteins and subsequent pull-down experiments with isolated SMN protein. Less functional SMN will show less or no interaction. Such assays can be performed using total protein extracts. Alternately, exon 7-included SMN can be detected through immunofluorescence analysis of biopsy cross-sections using various antibodies interacting with the region coded by exon 7, or with part of that region, or with folds only present in SMN comprising exon 7. Comparison with non-SMA (control) biopsies can be appropriate, as known to a skilled person.

[0104] In a preferred embodiment, an individual having SMA and being treated by an AON as defined herein will be provided an SMN protein which exhibits at least to some extent an activity of a wild type SMN protein, as typically encoded by the SMN1 gene. More preferably, if said individual is an SMA patient or is suspected to be an SMA patient, a functional SMN protein is an SMN protein with exon 7 included, as typically encoded by the SMN1 gene.

[0105] Alleviating one or more symptom(s) of SMA in an individual using an AON may be assessed by any of the following assays: improvement in weight gain of a subject, improvement in motor activity of a subject, and increased survival time, either of a subject, or of motor neuron cells, and increased production of functional SMN. Each of these parameters are known to the skilled person, and can be assayed routinely. For each of these assays, as soon as a detectable improvement or prolongation of a parameter measured in an assay has been found, it will preferably mean that one or more symptoms of SMA has been alleviated in an individual using an oligonucleotide according to the invention. Detectable improvement or prolongation is preferably a statistically significant improvement or prolongation. Alternatively, the alleviation of one or more symptom(s) of SMA may be assessed by measuring an improvement of a muscle function, integrity, and/or survival. In a preferred method, one or more symptom(s) of an SMA patient is/are alleviated and/or one or more characteristic(s) of one or more muscle cells from an SMA patient is/are improved. Such symptoms or characteristics may be assessed at the cellular, tissue level or on the patient's self.

[0106] An alleviation of one or more characteristics of a motor neuron cell from a patient may be assessed by any of the following assays on a cell from a patient: reduced calcium uptake, decreased snRNP production, decreased collagen synthesis, altered morphology, altered lipid biosynthesis, decreased oxidative stress, and/or improved muscle function, integrity, and/or survival. These parameters are usually assessed using immunofluorescence and/or histochemical analyses of cross sections of biopsies, such as muscle biopsies.

[0107] A detectable increase in motor neuron survival is preferably assessed in a muscle biopsy, using biopsy cross-sections. A detectable increase of survival may be an increase of 5%, 10%, 20%, 30%, 40%, 50%, 60%, 70%, 80%, 90% or more as compared to untreated control samples, or to known or previous rates of survival. The increase is measured by comparison to the survival as assessed in a same SMA patient before treatment.

[0108] A detectable increase in motor neuron survival can be assessed as known to the skilled person, for example using methods as described in Lunn et al., 2004.

[0109] Preferably, an AON provides said individual with a functional or a semi-functional SMN protein and is able to, for at least in part, decrease the production of an aberrant SMN protein such as SMNΔ7 in said individual.

[0110] Decreasing the production of an aberrant SMN mRNA, or aberrant SMN protein, preferably means that 90%, 80%, 70%, 60%, 50%, 40%, 30%, 20%, 10%, 5% or less of the initial amount of aberrant SMN mRNA, or aberrant SMN protein, is still detectable by RT-PCR (mRNA) or immunofluorescence or western blot analysis (protein). An aberrant SMN mRNA or protein is also referred to herein as a less functional (compared to a wild type functional SMN protein as earlier defined herein) or a non-functional SMN mRNA or protein. A non-functional SMN protein is preferably an SMN protein which is not able to bind Sm proteins and/or which does not promote, or which hampers, snRNP assembly. A non-functional SMN protein or SMN mRNA does typically not have, or does not encode, the amino acid sequence encoded by exon 7. The detection of a functional or semi-functional SMN mRNA or protein may be done as for an aberrant SMN mRNA or protein.

[0111] Once a SMA patient is provided with a functional or a semi-functional SMN protein, at least part of the cause of SMA is taken away. Hence, it would then be expected that the symptoms of SMA are at least partly alleviated, or that the rate with which the symptoms worsen is decreased, resulting in a slower decline. The enhanced inclusion frequency also increases the level of functional or semi-functional SMN protein produced in a cell of an SMA individual.

[0112] Exons and introns contain one or more specific sequences comprising splicing regulatory elements which have shown to be effective targets for antisense oligonucleotides. One embodiment therefore provides an oligonucleotide for providing said individual with a functional or semi-functional dystrophin or SMN protein wherein said oligonucleotide comprises a sequence which is specifically binding and/or blocking these splicing regulatory elements in a dystrophin or SMN2 pre-mRNA exon or intron. In addition, since an exon will only be included into the resulting mRNA when both the splice sites are recognized by the spliceosome complex, splice sites are other targets for an oligonucleotide of the invention. One embodiment therefore provides an oligonucleotide for providing said individual with a functional or semi-functional dystrophin or SMN protein wherein said oligonucleotide comprises a sequence which is specifically binding and/or blocking one of or both the splice sites of an exon of a dystrophin or SMN2 pre-mRNA. Usually a splice site of an exon comprises 1, 2, 3, or more nucleotides present in said exon and 1, 2, 3, or more nucleotides present in an adjacent or neighboring intron. In one embodiment an oligonucleotide is used which is solely binding to an intron region of a dystrophin or SMN2 pre-mRNA. This is however not necessary: it is also possible to use an oligonucleotide which targets, or binds an intron-specific sequence as well as exon-specific sequence. Of course, an oligonucleotide is not necessarily binding to the entire sequence of a dystrophin or SMN2 exon or intron. Oligonucleotides which are specifically binding part of such exon or intron are preferred. An oligonucleotide is used, said oligonucleotide is preferably complementary to, binds to or targets at least part of an exon and/or intron, said part having at least 10, 11, 12, 13, 14, 15, 16, 17, 18, 19, 20, 21, 22, 23, 24, 25, 26, 27, 28, 29, 30, 31, 32, or 33 nucleotides.

[0113] Splicing of a pre-mRNA occurs via two sequential transesterification reactions involving an intronic branch point and a splice site of an adjacent intron. Hence, an oligonucleotide is preferably used for exon skipping, wherein said oligonucleotide comprises a sequence which is binding to such branch point and/or splice site. Preferably said splice site and/or branch point is present in a dystrophin pre-mRNA.

[0114] Since splice sites contain consensus sequences, the use of an oligonucleotide part or a functional equivalent thereof comprising a sequence which is capable of binding to a splice site involves the risk of promiscuous hybridization. Hybridization of said oligonucleotide to other splice sites than the sites of the exon to be skipped could easily interfere with the accuracy of the splicing process. To overcome these and other potential problems related to the use of an oligonucleotide which is binding to a splice site, most preferred embodiment provides an oligonucleotide for providing said individual with a functional or a semi-functional dystrophin or SMN protein, wherein said oligonucleotide or a functional equivalent thereof, binding to a specific part of a dystrophin pre-mRNA exon or SMN2 pre-mRNA exon or intron. Exons contain coding sequences which are typically more specific that the non-coding intron sequences. Preferably, said oligonucleotide binding to a specific part of a dystrophin pre-mRNA exon is capable of specifically blocking, interfering and/or inhibiting a splicing regulatory sequence and/or structure of the anticipated exon(s) in said dystrophin or SMN2 pre-mRNA. Interfering with such splicing regulatory sequence and/or structure has the advantage that such elements are located within the exon. The risk for sequence-related off-target effects is therefore limited. In the case of exon skipping, by providing an oligonucleotide for the interior of the exon to be skipped, it is possible to mask the exon from the splicing apparatus. The failure of the splicing apparatus to recognize the exon to be skipped thus leads to exclusion of the exon from the final mRNA. In the case of exon inclusion, by providing an oligonucleotide for blocking for example an intronic splicing silencer (ISS), increase in exon inclusion is achieved. The hybridization of AONs to the ISS region can displace trans-acting negative repressors and/or can unwind a cis-acting RNA stem-loop that interferes with the binding of U1 small nuclear RNA at the 5′ splice site of the exon to be included These embodiments do not interfere directly with the enzymatic process of the splicing machinery (the joining of the exons). It is thought that this allows the method to be more specific and/or reliable.

[0115] Within the context of the invention, an oligonucleotide of the invention may comprise a functional equivalent of an oligonucleotide. A functional equivalent of an oligonucleotide preferably means an oligonucleotide as defined herein wherein one or more nucleotides have been substituted and wherein an activity of said functional equivalent is retained to at least some extent. Preferably, an activity of said oligonucleotide comprising a functional equivalent of an oligonucleotide is providing a functional or a semi-functional dystrophin or SMN protein. Said activity of said oligonucleotide comprising a functional equivalent of an oligonucleotide is therefore preferably assessed by quantifying the amount of a functional or a semi-functional dystrophin or SMN protein. A functional or semi-functional dystrophin is herein preferably defined as being a dystrophin able to bind actin and members of the DGC (or DAPC) protein complex. The assessment of said activity of said functional equivalent of an oligonucleotide is preferably done by RT-PCR and sequencing (on RNA level; for detection of specific exon skipping (DMD) or inclusion (SMA)), or by immunofluorescence and Western blot analyses (on protein level: for detection of protein restoration). Said activity is preferably retained to at least some extent when it represents at least 50%, or at least 60%, or at least 70% or at least 80% or at least 90% or at least 95% or more of corresponding activity of said oligonucleotide the functional equivalent derives from. Throughout this application, when the word oligonucleotide is used it may be replaced by a functional equivalent thereof as defined herein. Throughout this application, when the word oligonucleotide is used it may be replaced by an antisense oligonucleotide as defined herein unless otherwise indicated.

[0116] Hence, the use of an oligonucleotide according to the invention or a functional equivalent thereof, comprising a 2′-O-methyl monomer, preferably a 2′-O-methyl RNA monomer, or consisting of 2′-O-methyl RNA and optionally comprising phosphorothioate, and comprising at least one BNA scaffold modification with or without a 5-methylpyrimidine (i.e. a 5-methylcytosine and/or a 5-methyluracil) base and being represented by a nucleotide sequence comprising or consisting of a sequence which is complementary to, binds or targets or hybridizes with a dystrophin or SMN2 pre-mRNA exon or intron is assumed to have a positive effect on at least one of the parameters of said oligonucleotide, as has already been defined herein, when compared to their counterparts which do not comprise any BNA scaffold modification with/or without 5-methylcytosine and/or 5-methyluracil as indicated earlier herein, and is therefore assumed to exhibit an improved therapeutic result in a DMD or a BMD or an SMA cell of a patient and/or in a DMD or a BMD or an SMA patient. Such a therapeutic result may be characterized by alleviating one or more symptom(s) of DMD or BMD or SMA. Such a therapeutic result may also or alternately be characterized by:
[0117] reducing the rate of increase or worsening of one or more of said symptoms, and/or
[0118] alleviating one or more characteristics of a muscle cell from a patient and/or
[0119] providing said individual with a functional or semi-functional dystrophin or SMN protein and/or
[0120] decreasing loss of motor neurons in the spinal cord, and/or
[0121] decreasing atrophy of voluntary muscles, and/or—at least in part decreasing the production of an aberrant dystrophin protein in said individual.
   Each of these features has already been defined herein.

[0122] Preferably, an oligonucleotide is represented by a nucleotide sequence which comprises or consists of a sequence which is binding to, targeting or being complementary to at least a part of dystrophin or SMN2 pre-mRNA, said oligonucleotide having a length of at least 10 nucleotides. However, the length of said oligonucleotide may be at least 11, 12, 13, 14, 15, 16, 17, 18, 19, 20, 21, 22, 23, 24, 25, 26, 27, 28, 29, 30, 31, 32, or 33 nucleotides.

[0123] One preferred embodiment provides an oligonucleotide for providing said individual with a functional or a semi-functional dystrophin or SMN protein, said oligonucleotide or a functional equivalent thereof, being represented by a sequence which comprises:
[0124] a sequence which binds, targets, hybridizes or is complementary to a region of a dystrophin or SMN2 pre-mRNA exon that is hybridized to another part of a dystrophin or SMN2 pre-mRNA exon (closed structure), and
[0125] a sequence which binds, targets, hybridizes or is complementary to a region of a dystrophin or SMN2 pre-mRNA exon that is not hybridized in said dystrophin or SMN2 pre-mRNA (open structure).

[0126] For this embodiment, reference is made to the WO 2004/083446 patent application. RNA molecules exhibit strong secondary structures, mostly due to base pairing of complementary or partly complementary stretches within the same RNA. It has long since been thought that structures in the RNA play a role in the function of the RNA. Without being bound by theory, it is believed that the secondary structure of the RNA of an exon plays a role in structuring the splicing process. Through its structure, an exon is recognized as a part that needs to be included in the mRNA. In an embodiment, an oligonucleotide is capable of interfering with the structure of the exon and therefore capable of interfering with the splicing apparatus of said exon, masking the exon from the splicing apparatus and thereby inducing the skipping of said exon. It has been found that many oligonucleotides indeed comprise this capacity, some more efficient than others. Without being bound by theory it is thought that the overlap with an open structure improves the invasion efficiency of the oligonucleotide (i.e. increases the efficiency with which the oligonucleotide can enter the structure), whereas the overlap with the closed structure subsequently increases the efficiency of interfering with the secondary structure of the RNA of the exon. It is found that the length of the partial complementarity to both the closed and the open structure is not extremely restricted. We have observed high efficiencies with compounds comprising oligonucleotides with variable lengths of complementarity in either structure. The term (reverse) complementarity is used herein to refer to a stretch of nucleic acids that can hybridise to another stretch of nucleic acids under physiological conditions. An antisense strand is generally said to be complementary to a matching sense strand. In this context, an antisense oligonucleotide is complementary to its target. Hybridization conditions are later defined herein. It is thus not absolutely required that all the bases in the region of complementarity are capable of pairing with bases in the opposing strand. For instance, when designing an antisense oligonucleotide, one may want to incorporate for instance a residue that does not base pair with the base on the complementary strand. Mismatches may to some extent be allowed, if under the circumstances in the cell, the stretch of nucleotides is capable of hybridizing to the complementary part.

[0127] In a preferred embodiment a complementary part of an antisense oligonucleotide (either to said open or to said closed structure) comprises at least 3, and more preferably at least 4 consecutive nucleotides. The complementary regions are preferably designed such that, when combined, they are specific for an exon in a pre-mRNA. Such specificity may be created with various lengths of complementary regions as this depends on the actual sequences in other (pre-)mRNA in the system. The risk that also one or more other pre-mRNA will be able to hybridise to an oligonucleotide decreases with increasing size of said oligonucleotide. It is clear that an antisense oligonucleotide comprising mismatches in the region of complementarity but that retain the capacity to hybridise to the targeted region(s) in the pre-mRNA, can be used in the present invention. However, preferably at least the complementary parts do not comprise such mismatches as these typically have a higher efficiency and a higher specificity than oligonucleotide having such mismatches in one or more complementary regions. It is thought that higher hybridisation strengths, (i.e. increasing number of interactions with the opposing strand) are favourable in increasing the efficiency of the process of interfering with the splicing machinery of the system.

[0128] Preferably, for AONs that are suitable for inducing single-exon skipping, the complementarity is from 90 to 100%. In general this allows for 1 or 2 mismatch(es) in an oligonucleotide of 20 nucleotides or 1 to 4 mismatches in an oligonucleotide of 40 nucleotides. Therefore, we may have 1, 2, 3, 4, 5 mismatches in an oligonucleotide of 10 to 50 nucleotides. Preferably, 0, 1 or 2 mismatches are present in an oligonucleotide of 10 to 50 nucleotides.

[0129] For so-called multiskipping AONs (AONs that are capable of binding to a region of a first exon and to a region of another exon (i.e. a second exon) within the same pre-mRNA, wherein said region of said second exon has at least 50% identity with said region of said first exon) there is preferably at least 80% complementary to said region of said first exon and at least 45% complementary to said region of said second exon. More preferably, said antisense oligonucleotide is at least 85%, 90%, 95% or 100% complementary to said region of said first and at least 50%, 55%, 60%, 65%, 70%, 75%, 80%, 85%, 90%, 95% or 100% complementary to said region of said second exon. The complementarity is preferably but not necessarily assessed over the whole length of the oligonucleotide.

[0130] For such so-called multiskipping AONs, a region of a first exon may be at least 13, 14, 15, 16, 17, 18, 19, 20, 21, 22, 23, 24, 25, 26, 27, 28, 29, 30, 31, 32, 33, 34, 35, 36, 37, 38, 39, 40, 41, 42, 43, 44, 45, 46, 47, 48, 49, 50, 51, 52, 53, 54, 55, 56, 57, 58, 59, 60, 61, 62, 63, 64, 65, 66, 67, 68, 69, 70, 71, 72, 73, 74, 75, 76, 77, 78, 79, 80, or up to 90, 100, 110, 120, 130, 140, 150, 160, 170, 180, 190, 200, or more nucleotides. A region of a first exon may also be defined as being at least 1%, 5%, 10%, 20%, 30%, 40%, 50%, 60%, 70%, 80%, 90% or 100% of the length of said exon. A region of a first exon may be called an identity region.

[0131] For such so-called multiskipping AONs, a region of a second exon may be at least 13, 14, 15, 16, 17, 18, 19, 20, 21, 22, 23, 24, 25, 26, 27, 28, 29, 30, 31, 32, 33, 34, 35, 36, 37, 38, 39, 40, 41, 42, 43, 44, 45, 46, 47, 48, 49, 50, 51, 52, 53, 54, 55, 56, 57, 58, 59, 60, 61, 62, 63, 64, 65, 66, 67, 68, 69, 70, 71, 72, 73, 74, 75, 76, 77, 78, 79, 80 or up to 90, 100, 110, 120, 130, 140, 150, 160, 170, 180, 190, 200, or more nucleotides. A region of a second exon may be defined as being at least 1%, 5%, 10%, 20%, 30%, 40%, 50%, 60%, 70%, 80%, 90% or 100% of the length of said exon. A region of a second exon may be called an identity region. Preferred additional characteristics of so-called multiskipping AONs are described in WO2014007620.

[0132] The structure (i.e. open and closed structures) is best analyzed in the context of the pre-mRNA wherein the exon resides. Such structure may be analyzed in the actual RNA. However, it is currently possible to predict the secondary structure of an RNA molecule (at lowest energy costs) quite well using structure-modeling programs. Non-limiting examples of a suitable program are RNA structure version 4.5 or RNA mfold version 3.5 (Zuker et al., 2003). A person skilled in the art will be able to predict, with suitable reproducibility, a likely structure of an exon, given a nucleotide sequence. Best predictions are obtained when providing such modeling programs with both said exon and flanking intron sequences. It is typically not necessary to model the structure of the entire pre-mRNA.

[0133] The open and closed structure to which the oligonucleotide of an oligonucleotide is directed, are preferably adjacent to one another. It is thought that in this way the annealing of the oligonucleotide to the open structure induces opening of the closed structure whereupon annealing progresses into this closed structure. Through this action the previously closed structure assumes a different conformation. However, when potential (cryptic) splice acceptor and/or donor sequences are present within the targeted exon, occasionally a new exon inclusion signal is generated defining a different (neo) exon, i.e. with a different 5′ end, a different 3′ end, or both. This type of activity is within the scope of the present invention as the targeted exon is excluded from the mRNA. The presence of a new exon, containing part of the targeted exon, in the mRNA does not alter the fact that the targeted exon, as such, is excluded. The inclusion of a neo-exon can be seen as a side effect which occurs only occasionally. There are two possibilities when exon skipping is used to restore (part of) an open reading frame of dystrophin that is disrupted as a result of a mutation. One is that the neo-exon is functional in the restoration of the reading frame, whereas in the other case the reading frame is not restored. When selecting a compound comprising an oligonucleotide for restoring dystrophin reading frames by means of exon-skipping it is of course clear that under these conditions only those compounds comprising those oligonucleotide are selected that indeed result in exon-skipping that restores the dystrophin open reading frame, with or without a neo-exon.

[0134] Further provided is an oligonucleotide for providing said individual with a functional or a semi-functional dystrophin protein, wherein said oligonucleotide or a functional equivalent thereof is an oligonucleotide as described above, i.e. it comprises a 2′-O-methyl monomer or consists of 2′-O-methyl monomers, preferably 2′-O-methyl RNA monomers, and optionally comprises phosphorothioate, and further comprises a BNA scaffold with or without a 5-methylpyrimidine (i.e. a 5-methylcytosine, and/or a 5-methyluracil) and is represented by a nucleotide sequence comprising a sequence that is complementary to or binds or targets or hybridizes with a binding site for a serine-arginine (SR) protein in RNA of an exon of a dystrophin pre-mRNA. In WO 2006/112705 patent application we have disclosed the presence of a correlation between the effectivity of an exon-internal antisense oligonucleotide in inducing exon skipping and the presence of a (for example by ESEfinder) predicted SR binding site in the target pre-mRNA site of said AON. Therefore, in one embodiment an oligonucleotide is generated comprising determining a (putative) binding site for an SR (Ser-Arg) protein in RNA of a dystrophin exon and producing a corresponding compound comprising oligonucleotide that is complementary to, binds or targets or hybridizes with said RNA and that at least partly overlaps said (putative) binding site. The term “at least partly overlaps” is defined herein as to comprise an overlap of only a single nucleotide of an SR binding site as well as multiple nucleotides of said binding site as well as a complete overlap of said binding site. This embodiment preferably further comprises determining from a secondary structure of said RNA, a region that is hybridized to another part of said RNA (closed structure) and a region that is not hybridized in said structure (open structure), and subsequently generating an oligonucleotide that at least partly overlaps said (putative) binding site and that overlaps at least part of said closed structure and overlaps at least part of said open structure. In this way we increase the chance of obtaining an oligonucleotide that is capable of interfering with the exon inclusion from the pre-mRNA into mRNA. It is possible that a first selected SR-binding region does not have the requested open-closed structure in which case another (second) SR protein binding site is selected which is then subsequently tested for the presence of an open-closed structure. This process is continued until a sequence is identified which contains an SR protein binding site as well as a(n) (partly overlapping) open-closed structure. This sequence is then used to design an oligonucleotide which is complementary to said sequence.

[0135] Such a method for generating an antisense oligonucleotide is also performed by reversing the described order, i.e. first generating an oligonucleotide comprising determining, from a secondary structure of RNA from a dystrophin exon, a region that assumes a structure that is hybridised to another part of said RNA (closed structure) and a region that is not hybridised in said structure (open structure), and subsequently generating an oligonucleotide, of which at least a part of said oligonucleotide is complementary to said closed structure and of which at least another part of said oligonucleotide is complementary to said open structure. This is then followed by determining whether an SR protein binding site at least overlaps with said open/closed structure. In this way the method of WO 2004/083446 is improved. In yet another embodiment the selections are performed simultaneously.

[0136] Without wishing to be bound by any theory it is currently thought that use of an oligonucleotide directed to or targeting an SR protein binding site results in (at least partly) impairing the binding of an SR protein to the binding site of an SR protein which results in disrupted or impaired splicing.

[0137] Preferably, an open/closed structure and an SR protein binding site partly overlap and even more preferred an open/closed structure completely overlaps an SR protein binding site or an SR protein binding site completely overlaps an open/closed structure. This allows for an improved disruption of exon inclusion.

[0138] Besides consensus splice site and branchpoint intronic sequences, many (if not all) exons contain splicing regulatory sequences such as but not limited to exonic splicing enhancer (ESE) sequences to facilitate the recognition of genuine splice sites by the spliceosome (Cartegni et al., 2002; and Cartegni et al., 2003). A subgroup of splicing factors, called the SR proteins, can bind to these ESEs and recruit other splicing factors, such as U1 and U2AF to (weakly defined) splice sites. The binding sites of the four most abundant SR proteins (SF2/ASF, SC35, SRp40 and SRp55) have been analyzed in detail and these results are implemented in ESEfinder, a web source that predicts potential binding sites for these SR proteins (Cartegni et al., 2002; and Cartegni et al., 2003). In embodiments where the AON is for exon skipping, there is a correlation between the effectiveness of an AON and the presence/absence of an SF2/ASF, SC35 and SRp40 binding site in the site targeted by said AON. In a preferred embodiment, the invention thus provides an oligonucleotide as described above, which is complementary to or targets or binds a binding site for a SR protein. Preferably, said SR protein is SF2/ASF or SC35 or SRp40. In embodiments where the AON is for exon inclusion, there is a correlation between the effectiveness of an AON and the presence of a U1 small nuclear RNA binding site or a heterogeneous nuclear ribonucleoprotein (hnRNP) binding site or a small nuclear ribonucleoprotein (snRNP) in the site targeted by said AON. In a preferred embodiment, the invention provides an oligonucleotide as described above, which is complementary to or targets or binds a binding site for a snRNA, such as U1 small nuclear RNA, a snRNP, or a hnRNP.

[0139] In one embodiment a DMD patient is provided with a functional or a semi-functional dystrophin protein by using an oligonucleotide as described above, or a functional equivalent thereof, i.e. an oligonucleotide comprising a 2′-O-methyl monomer, preferably a 2′-O-methyl RNA monomer, or consisting of 2′-O-methyl RNA and comprising at least one BNA scaffold with or without a 5-methylpyrimidine (i.e. a 5-methylcytosine, and/or a 5-methyluracil) base and being capable of specifically binding or targeting a regulatory RNA sequence which is required for the correct splicing of a dystrophin exon in a transcript. Several cis-acting RNA sequences are required for the correct splicing of exons in a transcript. In particular, elements such as an exonic splicing enhancer (ESE), an exon recognition sequence (ERS), and/or an exonic splicing silencer (ESS) and/or an intronic splicing silencer (ISS) are identified to regulate specific and efficient splicing of constitutive and alternative exons. Using a sequence-specific antisense oligonucleotide (AON) that binds to, targets or is complementary to the elements, their regulatory function is disturbed so that the exon is skipped or included, as shown for DMD or SMA. Hence, in one preferred embodiment, an oligonucleotide or a functional equivalent thereof is used which is complementary to, binds or targets an exonic splicing enhancer (ESE), an exon recognition sequence (ERS), and/or an exonic splicing silencer (ESS) and/or an intronic splicing silencer (ISS).

[0140] In a preferred embodiment, an oligonucleotide of the invention that is suitable for inducing the skipping of a single exon comprises or consists of a sequence that is complementary to or binds or targets or hybridizes with at least a part of dystrophin pre-mRNA exons 44, 45, 46, 47, 48, 49, 50, 51, 52, 53, 54, or 55, said part having at least 10 nucleotides. However, said part may also have at least 11, 12, 13, 14, 15, 16, 17, 18, 19, 20, 21, 22, 23, 24, 25, 26, 27, 28, 29, 30, 31, 32, or, 33 nucleotides. For the dystrophin exons identified above, we provide a stretch of nucleotides (SEQ ID NO: 2 to 7) from said exon to which an oligonucleotide preferably binds or is complementary to or targets or hybridizes with.

[0141] In a preferred embodiment, an oligonucleotide of the invention that is suitable for so-called multiskipping as defined earlier herein induces the skipping of the following dystrophin exons: exons 8 to 19, exons 9 to 22, exons 9 to 30, exons 10 to 18, exons 10 to 30, exons 10 to 42, exons 10 to 47, exons 10 to 57, exons 10 to 60, exons 11 to 23, exons 13 to 30, exons 23 to 42, exons 34 to 53, exons 40 to 53, exons 44 to 56, exons 45 to 51, exons 45 to 53, exons 45 to 55, exons 45 to 60 or exons 56 to 60. Preferably, such a so-called multiskipping oligonucleotide according to the invention comprises or consists of a sequence that is capable of binding to, targeting, hybridizing and/or is reverse-complementary to a region of a first exon of the dystrophin pre-mRNA such that the reverse-complementary part is at least 30% of the length of said oligonucleotide of the invention, more preferably at least 40%, even more preferably at least 50%, even more preferably at least 60%, even more preferably at least 70%, even more preferably at least 80%, even more preferably at least 90% or even more preferably at least 95%, or even more preferably 98% and most preferably up to 100%. In this context, a first exon is preferably exon 8, 9, 10, 11, 13, 23, 34, 40, 44, 45, or 56 of dystrophin pre-mRNA as defined herein. Said oligonucleotide may comprise additional flanking sequences. In a more preferred embodiment, the length of said reverse-complementary part of said oligonucleotide is at least 10, 11, 12, 13, 14, 15, 16, 17, 18, 19, 20, 21, 22, 23, 24, 25, 26, 27, 28, 29, 30, 31, 32, 33, 34, 35, 36, 37, 38, 39, or 40 nucleotides. Several types of flanking sequences may be used. Preferably, flanking sequences are used to modify the binding of a protein to said oligonucleotide, or to modify a thermodynamic property of said oligonucleotide, more preferably to modify target RNA binding affinity. In another preferred embodiment, additional flanking sequences are reverse-complementary to sequences of the dystrophin pre-mRNA which are not present in said exon.

[0142] A preferred oligonucleotide comprises:
[0143] i) Ia) at least one 2′-substituted monomer, preferably an RNA monomer or a 2′-O-substituted RNA monomer, and optionally a phosphorothioate backbone linkage, or
   [0144] Ib) only 2′-substituted monomers, preferably RNA monomers or 2′-O-substituted RNA monomers, linked by phosphorothioate backbone linkages and/or by phosphodiester linkages,
[0145] ii) a 5-methylcytosine and/or a 5-methyluracil base and
[0146] iii) at least one monomer comprising a bicyclic nucleic acid (BNA) scaffold modification,

[0147] and binds or is complementary to or targets or hybridizes with a continuous stretch of at least 10 and up to 33 nucleotides within at least one of the following exon nucleotide sequences selected from SEQ ID NO: 2 to 7, more preferably from:

(SEQ ID NO: 2)
5′-GCGAUUUGACAGAUCUGUUGAGAAAUGGCGGCGUUUUCAUUAU
GAUAUAAAGAUAUUUAAUCAGUGGCUAACAGAAGCUGAACAGUUUC
UCAGAAAGACACAAAUUCCUGAGAAUUGGGAACAUGCUAAAUACAA
AUGGUAUCUUAAG-3′
for skipping or at least skipping of exon 44;
(SEQ ID NO: 3)
5′-GAACUCCAGGAUGGCAUUGGGCAGCGGCAAACUGUUGUCAGAA
CAUUGAAUGCAACUGGGGAAGAAAUAAUUCAGCAAUCCUCAAAAAC
AGAUGCCAGUAUUCUACAGGAAAAAUUGGGAAGCCUGAAUCUGCGG
UGGCAGGAGGUCUGCAAACAGCUGUCAGACAGAAAAAAGAG-3′
for skipping or at least skipping of exon 45;
(SEQ ID NO: 4)
5′-CUCCUACUCAGACUGUUACUCUGGUGACACAACCUGUGGUUAC
UAAGGAAACUGCCAUCUCCAAACUAGAAAUGCCAUCUUCCUUGAUG
UUGGAGGUACCUGCUCUGGCAGAUUUCAACCGGGCUUGGACAGAAC
UUACCGACUGGCUUUCUCUGCUUGAUCAAGUUAUAAAAUCACAGAG
GGUGAUGGUGGGUGACCUUGAGGAUAUCAACGAGAUGAUCAUCAAG
CAGAAG-3′
for skipping or at least skipping of exon 51;
(SEQ ID NO: 5)
5′-GCAACAAUGCAGGAUUUGGAACAGAGGCGUCCCCAGUUGGAAG
AACUCAUUACCGCUGCCCAAAAUUUGAAAAACAAGACCAGCAAUCA
AGAGGCUAGAACAAUCAUUACGGAUCGAA-3′
for skipping or at least skipping of exon 52;
(SEQ ID NO: 6)
5′-UUGAAAGAAUUCAGAAUCAGUGGGAUGAAGUACAAGAACACCU
UCAGAACCGGAGGCAACAGUUGAAUGAAAUGUUAAAGGAUUCAACA
CAAUGGCUGGAAGCUAAGGAAGAAGCUGAGCAGGUCUUAGGACAGG
CCAGAGCCAAGCUUGAGUCAUGGAAGGAGGGUCCCUAUACAGUAGA
UGCAAUCCAAAAGAAAAUCACAGAAACCAAG-3′
for skipping or at least skipping of exon 53;
(SEQ ID NO: 7)
5′-GGUGAGUGAGCGAGAGGCUGCUUUGGAAGAAACUCAUAGAUUA
CUGCAACAGUUCCCCCUGGACCUGGAAAAGUUUCUUGCCUGGCUUA
CAGAAGCUGAAACAACUGCCAAUGUCCUACAGGAUGCUACCCGUAA
GGAAAGGCUCCUAGAAGACUCCAAGGGAGUAAAAGAGCUGAUGAAA
CAAUGGCAA-3′
for skipping or at least skipping of exon 55.

[0148] Another preferred oligonucleotide comprises:
[0149] i) Ia) at least one 2′-substituted monomer, preferably an RNA monomer or a 2′-O-substituted RNA monomer, and optionally a phosphorothioate backbone linkage, or
   [0150] Ib) only 2′-substituted monomers, preferably RNA monomers or 2′-O-substituted RNA monomers, linked by phosphorothioate backbone linkages and/or by phosphodiester linkages,
[0151] ii) a 5-methylcytosine and/or a 5-methyluracil base and
[0152] iii) at least one monomer comprising a bicyclic nucleic acid (BNA) scaffold modification,

[0153] and comprises a continuous stretch of at least 10 and up to 33 nucleotides of at least one of the following nucleotide sequences selected from SEQ ID NO: 6065 to 6070, more preferably from:

(SEQ ID NO: 6065)
5′-CUUAAGAUACCAUUUGUAUUUAGCAUGUUCCCAAUUCUCAGGA
AUUUGUGUCUUUCUGAGAAACUGUUCAGCUUCUGUUAGCCACUGAU
UAAAUAUCUUUAUAUCAUAAUGAAAACGCCGCCAUUUCUCAACAGA
UCUGUCAAAUCGC-3′
for skipping at least exon 44,
(SEQ ID NO: 6066)
5′-CUCUUUUUUCUGUCUGACAGCUGUUUGCAGACCUCCUGCCACC
GCAGAUUCAGGCUUCCCAAUUUUUCCUGUAGAAUACUGGCAUCUGU
UUUUGAGGAUUGCUGAAUUAUUUCUUCCCCAGUUGCAUUCAAUGUU
CUGACAACAGUUUGCCGCUGCCCAAUGCCAUCCUGGAGUUC-3′
for skipping at least exon 45,
(SEQ ID NO: 6067)
5′-CUUCUGCUUGAUGAUCAUCUCGUUGAUAUCCUCAAGGUCACCC
ACCAUCACCCUCUGUGAUUUUAUAACUUGAUCAAGCAGAGAAAGCC
AGUCGGUAAGUUCUGUCCAAGCCCGGUUGAAAUCUGCCAGAGCAGG
UACCUCCAACAUCAAGGAAGAUGGCAUUUCUAGUUUGGAGAUGGCA
GUUUCCUUAGUAACCACAGGUUGUGUCACCAGAGUAACAGUCUGAG
UAGGAG-3′
for skipping at least exon 51,
(SEQ ID NO: 6068)
5′-UUCGAUCCGUAAUGAUUGUUCUAGCCUCUUGAUUGCUGGUCUU
GUUUUUCAAAUUUUGGGCAGCGGUAAUGAGUUCUUCCAACUGGGGA
CGCCUCUGUUCCAAAUCCUGCAUUGUUGC-3′
for skipping at least exon 52,
(SEQ ID NO: 6069)
5′-CUUGGUUUCUGUGAUUUUCUUUUGGAUUGCAUCUACUGUAUAG
GGACCCUCCUUCCAUGACUCAAGCUUGGCUCUGGCCUGUCCUAAGA
CCUGCUCAGCUUCUUCCUUAGCUUCCAGCCAUUGUGUUGAAUCCUU
UAACAUUUCAUUCAACUGUUGCCUCCGGUUCUGAAGGUGUUCUUGU
ACUUCAUCCCACUGAUUCUGAAUUCUUUCAA-3′
for skipping at least exon 53,
(SEQ ID NO: 6070)
5′-UUGCCAUUGUUUCAUCAGCUCUUUUACUCCCUUGGAGUCUUCU
AGGAGCCUUUCCUUACGGGUAGCAUCCUGUAGGACAUUGGCAGUUG
UUUCAGCUUCUGUAAGCCAGGCAAGAAACUUUUCCAGGUCCAGGGG
GAACUGUUGCAGUAAUCUAUGAGUUUCUUCCAAAGCAGCCUCUCGC
UCACUCACC-3′
for skipping at least exon 55.

[0154] In preferred embodiments, the oligonucleotide according to the invention comprises or consists of a nucleotide sequence represented by SEQ ID NOs: 8-271 or SEQ ID NOs: 1608-2099 or SEQ ID NOs: 3000-3184. These oligonucleotides are preferably for skipping dystrophin pre-mRNA exon 44.

[0155] In preferred embodiments, the oligonucleotide according to the invention comprises or consists of a nucleotide sequence represented by SEQ ID NOs: 272-451 or SEQ ID NOs: 3185-4527. These oligonucleotides are preferably for skipping dystrophin pre-mRNA exon 45.

[0156] In preferred embodiments, the oligonucleotide according to the invention comprises or consists of a nucleotide sequence represented by SEQ ID NOs: 452-613 or SEQ ID NOs: 4528-4572. In more preferred embodiments, the oligonucleotide according to the invention comprises or consists of a nucleotide sequence represented by SEQ ID NOs: 455, 459, 4528, 4531, 4532, 4533, 4535, 4542, 4548, or 4568. These oligonucleotides are preferably for skipping dystrophin pre-mRNA exon 51.

[0157] In preferred embodiments, the oligonucleotide according to the invention comprises or consists of a nucleotide sequence represented by SEQ ID NOs: 842-1159 or SEQ ID NOs: 4573-6048. These oligonucleotides are preferably for skipping dystrophin pre-mRNA exon 53.

[0158] In preferred embodiments, the oligonucleotide according to the invention comprises or consists of a nucleotide sequence represented by SEQ ID NO: 614-841. These oligonucleotides are preferably for skipping dystrophin pre-mRNA exon 52.

[0159] In preferred embodiments, the oligonucleotide according to the invention comprises or consists of a nucleotide sequence represented by SEQ ID NO: 1160-1399. These oligonucleotides are preferably for skipping dystrophin pre-mRNA exon 55.

[0160] SEQ ID NOs: 6065-6070 represent reverse complementary sequences to SEQ ID NOs: 2-7. In a more preferred embodiment, the oligonucleotide according to the invention has a length from 10 to 33 nucleotides and comprises:
[0161] i) only 2′-substituted monomers, preferably RNA monomers or 2′-O-substituted RNA monomers, linked by phosphorothioate backbone linkages and/or by phosphodiester linkages,
[0162] ii) a 5-methylcytosine base, and
[0163] iii) at least one monomer comprising a bicyclic nucleic acid (BNA) scaffold modification,

[0164] and comprises a continuous stretch of at least 10 and up to 33 nucleotides of at least one of the nucleotide sequences selected from SEQ ID NO: 6065 to 6070, preferably SEQ ID NO: 6067.

[0165] In an even more preferred embodiment, the oligonucleotide according to the invention has a length from 10 to 33 nucleotides and comprises:
[0166] i) only 2′-substituted monomers, preferably 2′-O-substituted RNA monomers, linked by phosphorothioate backbone linkages,
[0167] ii) a 5-methylcytosine base, and
[0168] iii) at least one monomer comprising a bicyclic nucleic acid (BNA) scaffold modification,
   and comprises a continuous stretch of at least 10 and up to 33 nucleotides of at least one of the nucleotide sequences selected from SEQ ID NO: 6065 to 6070, preferably SEQ ID NO: 6067. In more preferred embodiments, such an oligonucleotide has at least two monomers comprising a BNA scaffold modification.

[0169] In these embodiments, it is preferred that said continuous stretch is of at least 16 to 26 nucleotides, or from 16 to 25 nucleotides in length. In another embodiment, said continuous stretch is from 16 to 24 nucleotides in length. In another embodiment, said continuous stretch is from 16 to 22 nucleotides in length. In another embodiment, said continuous stretch is 16, 18, 20, or 22 nucleotides in length. In another embodiment, said continuous stretch is 21, 22, 24, or 25 nucleotides in length. In another embodiment, said continuous stretch is 18, 22, 24, or 25 nucleotides in length. The oligonucleotide of the invention preferably consists of said continuous stretch.

[0170] More preferred oligonucleotides comprise at least one 2′-substituted monomer and optionally a phosphorothioate backbone linkage, or only 2′-substituted monomers linked by phosphorothioate backbone linkages and/or by phosphodiester linkages, comprise a 5-methylcytosine and/or a 5-methyluracil base and comprise at least one monomer comprising a bicyclic nucleic acid (BNA) scaffold modification, and are represented by a nucleotide sequence comprising or consisting of SEQ ID NO: 8-1580 or SEQ ID NO: 1592-1607, or by a nucleotide sequence comprising or consisting of a fragment of SEQ ID NO: 8-1580 or SEQ ID NO: 1592-1607. More preferred oligonucleotides comprise at least one 2′-substituted monomer and optionally a phosphorothioate backbone linkage, or only 2′-substituted monomers linked by phosphorothioate backbone linkages and/or by phosphodiester linkages, comprise a 5-methylcytosine and/or a 5-methyluracil base and comprise at least one monomer comprising a bicyclic nucleic acid (BNA) scaffold modification, and are represented by a nucleotide sequence comprising or consisting of SEQ ID NO: 8-1580 or SEQ ID NO: 1592-2099 or SEQ ID NO: 3000-6048, or by a nucleotide sequence comprising or consisting of a fragment of SEQ ID NO: 8-1580 or SEQ ID NO: 1592-2099 or SEQ ID NO: 3000-6048. Such oligonucleotides preferably have a length of 16-30 nucleotides, more preferably of 16-24 nucleotides, most preferably of 19, 22, or 22 nucleotides. More preferred oligonucleotides are as described above, and are represented by a nucleotide sequence comprising or consisting of SEQ ID NO: 9-13, 15-19, 21-25, 27-31, 33-37, 39-43, 45-49, 51-55, 57-61, 63-67, 69-73, 75-79, 81-85, 87-91, 93-97, 99-103, 105-109, 111-115, 117-121, 123-127, 129-133, 135-139, 141-145, 147-151, 153-157, 159-163, 165-169, 171-175, 177-181, 183-187, 189-193, 195-199, 201-205, 207-211, 213-217, 219-223, 225-229, 231-235, 237-241, 243-247, 249-253, 255-259, 261-265, 267-271, 273-277, 279-283, 285-289, 291-295, 297-301, 303-307, 309-313, 315-319, 321-325, 327-331, 333-337, 339-343, 345-349, 351-355, 357-361, 363-367, 369-373, 375-379, 381-385, 387-391, 393-397, 399-403, 405-409, 411-415, 417-421, 423-427, 429-433, 435-439, 441-445, 447-451, 453-457, 459-463, 465-469, 471-475, 477-481, 483-487, 489-493, 495-499, 501-505, 507-511, 513-517, 519-523, 525-529, 531-535, 537-541, 543-547, 549-553, 555-559, 561-565, 567-571, 573-577, 579-583, 585-589, 591-595, 597-601, 603-607, 609-613, 615-619, 621-625, 627-631, 633-637, 639-643, 645-649, 651-655, 657-661, 663-667, 669-673, 675-679, 681-685, 687-691, 693-697, 699-703, 705-709, 711-715, 717-721, 723-727, 729-733, 735-739, 741-745, 747-751, 753-757, 759-763, 765-769, 771-775, 777-781, 783-787, 789-793, 795-799, 801-805, 807-811, 813-817, 819-823, 825-829, 831-835, 837-841, 843-847, 849-853, 855-859, 861-865, 867-871, 873-877, 879-883, 885-889, 891-895, 897-901, 903-907, 909-913, 915-919, 921-925, 927-931, 933-937, 939-943, 945-949, 951-955, 957-961, 963-967, 969-973, 975-979, 981-985, 987-991, 993-997, 999-1003, 1005-1009, 1011-1015, 1017-1021, 1023-1027, 1029-1033, 1035-1039, 1041-1045, 1047-1051, 1053-1057, 1059-1063, 1065-1069, 1071-1075, 1077-1081, 1083-1087, 1089-1093, 1095-1099, 1101-1105, 1107-1111, 1113-1117, 1119-1123, 1125-1129, 1131-1135, 1137-1141, 1143-1147, 1149-1153, 1155-1159, 1161-1165, 1167-1171, 1173-1177, 1179-1183, 1185-1189, 1191-1195, 1197-1201, 1203-1207, 1209-1213, 1215-1219, 1221-1225, 1227-1231, 1233-1237, 1239-1243, 1245-1249, 1251-1255, 1257-1261, 1263-1267, 1269-1273, 1275-1279, 1281-1285, 1287-1291, 1293-1297, 1299-1303, 1305-1309, 1311-1315, 1317-1321, 1323-1327, 1329-1333, 1335-1339, 1341-1345, 1347-1351, 1353-1357, 1359-1363, 1365-1369, 1371-1375, 1377-1381, 1383-1387, 1389-1393, 1395-1399, 1401-1405, 1407-1411, 1413-1417, 1419-1423, 1425-1429, 1431-1435, 1437-1441, 1443-1447, 1449-1453, 1455-1459, 1461-1465, 1467-1471, 1473-1477, 1479-1483, 1485-1489, 1491-1495, 1497-1501, 1503-1507, 1509-1513, 1515-1519, 1521-1525, 1527-1531, 1533-1537, 1539-1543, 1545-1549, 1551-1555, 1557-1561, 1563-1567, 1569-1573, 1575-1579, 1592-2099, or 3000-6048 or by a nucleotide sequence comprising or consisting of a fragment of SEQ ID NO: 9-13, 15-19, 21-25, 27-31, 33-37, 39-43, 45-49, 51-55, 57-61, 63-67, 69-73, 75-79, 81-85, 87-91, 93-97, 99-103, 105-109, 111-115, 117-121, 123-127, 129-133, 135-139, 141-145, 147-151, 153-157, 159-163, 165-169, 171-175, 177-181, 183-187, 189-193, 195-199, 201-205, 207-211, 213-217, 219-223, 225-229, 231-235, 237-241, 243-247, 249-253, 255-259, 261-265, 267-271, 273-277, 279-283, 285-289, 291-295, 297-301, 303-307, 309-313, 315-319, 321-325, 327-331, 333-337, 339-343, 345-349, 351-355, 357-361, 363-367, 369-373, 375-379, 381-385, 387-391, 393-397, 399-403, 405-409, 411-415, 417-421, 423-427, 429-433, 435-439, 441-445, 447-451, 453-457, 459-463, 465-469, 471-475, 477-481, 483-487, 489-493, 495-499, 501-505, 507-511, 513-517, 519-523, 525-529, 531-535, 537-541, 543-547, 549-553, 555-559, 561-565, 567-571, 573-577, 579-583, 585-589, 591-595, 597-601, 603-607, 609-613, 615-619, 621-625, 627-631, 633-637, 639-643, 645-649, 651-655, 657-661, 663-667, 669-673, 675-679, 681-685, 687-691, 693-697, 699-703, 705-709, 711-715, 717-721, 723-727, 729-733, 735-739, 741-745, 747-751, 753-757, 759-763, 765-769, 771-775, 777-781, 783-787, 789-793, 795-799, 801-805, 807-811, 813-817, 819-823, 825-829, 831-835, 837-841, 843-847, 849-853, 855-859, 861-865, 867-871, 873-877, 879-883, 885-889, 891-895, 897-901, 903-907, 909-913, 915-919, 921-925, 927-931, 933-937, 939-943, 945-949, 951-955, 957-961, 963-967, 969-973, 975-979, 981-985, 987-991, 993-997, 999-1003, 1005-1009, 1011-1015, 1017-1021, 1023-1027, 1029-1033, 1035-1039, 1041-1045, 1047-1051, 1053-1057, 1059-1063, 1065-1069, 1071-1075, 1077-1081, 1083-1087, 1089-1093, 1095-1099, 1101-1105, 1107-1111, 1113-1117, 1119-1123, 1125-1129, 1131-1135, 1137-1141, 1143-1147, 1149-1153, 1155-1159, 1161-1165, 1167-1171, 1173-1177, 1179-1183, 1185-1189, 1191-1195, 1197-1201, 1203-1207, 1209-1213, 1215-1219, 1221-1225, 1227-1231, 1233-1237, 1239-1243, 1245-1249, 1251-1255, 1257-1261, 1263-1267, 1269-1273, 1275-1279, 1281-1285, 1287-1291, 1293-1297, 1299-1303, 1305-1309, 1311-1315, 1317-1321, 1323-1327, 1329-1333, 1335-1339, 1341-1345, 1347-1351, 1353-1357, 1359-1363, 1365-1369, 1371-1375, 1377-1381, 1383-1387, 1389-1393, 1395-1399, 1401-1405, 1407-1411, 1413-1417, 1419-1423, 1425-1429, 1431-1435, 1437-1441, 1443-1447, 1449-1453, 1455-1459, 1461-1465, 1467-1471, 1473-1477, 1479-1483, 1485-1489, 1491-1495, 1497-1501, 1503-1507, 1509-1513, 1515-1519, 1521-1525, 1527-1531, 1533-1537, 1539-1543, 1545-1549, 1551-1555, 1557-1561, 1563-1567, 1569-1573, 1575-1579, 1592-2099, or 3000-6048. Within the context of the invention, a fragment of SEQ ID NO: 8-1580 or SEQ ID NO: 1592-2099 or SEQ ID NO: 3000-6048 preferably means a nucleotide sequence comprising or consisting of at least 10 contiguous nucleotides from said SEQ ID NO.

[0171] More preferred oligonucleotides comprise at least one 2′-substituted monomer, preferably an RNA monomer, and optionally a phosphorothioate backbone linkage, or only 2′-substituted monomers linked by phosphorothioate backbone linkages and/or by phosphodiester linkages, comprise a 5-methylcytosine and/or a 5-methyluracil base and comprise at least one monomer comprising a bicyclic nucleic acid (BNA) scaffold modification, and are represented by a nucleotide sequence comprising or consisting of SEQ ID NO: 8-1580 or SEQ ID NO: 1592-2099 or SEQ ID NO: 3000-6048, or by a nucleotide sequence comprising or consisting of fragment of SEQ ID NO: 8-1580 or SEQ ID NO: 1592-2099 or SEQ ID NO: 3000-6048, and have a length of 10, 11, 12, 13, 14, 15, 16, 17, 18, 19, 20, 21, 22, 23, 24, 25, 26, 27, 28, 29, 30, 31, 32 or 33 nucleotides.

[0172] Preferred sequences include SEQ ID NO: 452-613 and SEQ ID NO: 1592-1605 and SEQ ID NO: 1607, more preferably SEQ ID NO: 453-457, 459-463, 465-469, 471-475, 477-481, 483-487, 489-493, 495-499, 501-505, 507-511, 513-517, 519-523, 525-529, 531-535, 537-541, 543-547, 549-553, 555-559, 561-565, 567-571, 573-577, 579-583, 585-589, 591-595, 597-601, 603-607, 609-613, 1592-1605, and 1607, and even more preferably SEQ ID NO: 453, 455, 456, 459, 461, 462, 465, 467, 468, 471, 473, 474, 483, 486, 1592, 1593, 1594, 1595, 1596, 1597, 1598, 1599, 1600, 1601, 1602, 1603, 1604, 1605, or 1607. The most preferred sequences are SEQ ID NO: 455, 459, 4528, 4531, 4532, 4533, 4535, 4542, 4548, and 4568.

[0173] In a preferred embodiment, an oligonucleotide is represented by a nucleotide sequence comprising or consisting of SEQ ID NO: 8-271 or SEQ ID NO:1608-2099 or SEQ ID NO: 3000-3184 and is for skipping exon 44 of the pre-mRNA of dystrophin, and comprises one or more of the following:
[0174] at least one 2′-substituted monomer
[0175] at least one phosphorothioate backbone linkage;
[0176] only 2′-substituted monomers;
[0177] only phosphorothioate backbone linkages;
[0178] only 2′-substituted monomers linked by phosphorothioate backbone linkages;
[0179] a 5-methylcytosine and/or a 5-methyluracil base;
[0180] only 5-methylcytosine bases instead of cytosine bases;
[0181] at least one monomer comprising a bicyclic nucleic acid (BNA) scaffold modification.

[0182] Preferably, said oligonucleotide comprises only 2′-substituted monomers, only phosphorothioate backbone linkages, and at least one monomer comprising a BNA scaffold modification More preferably, said oligonucleotide is represented by a nucleotide sequence comprising or consisting of SEQ ID NO: 9-13, 15-19, 21-25, 27-31, 33-37, 39-43, 45-49, 51-55, 57-61, 63-67, 69-73, 75-79, 81-85, 87-91, 93-97, 99-103, 105-109, 111-115, 117-121, 123-127, 129-133, 135-139, 141-145, 147-151, 153-157, 159-163, 165-169, 171-175, 177-181, 183-187, 189-193, 195-199, 201-205, 207-211, 213-217, 219-223, 225-229, 231-235, 237-241, 243-247, 249-253, 255-259, 261-265, or 267-271. Preferably, said oligonucleotide has a length of 10 to 33 nucleotides, most preferably of 16 to 22 nucleotides.

[0183] In a preferred embodiment, an oligonucleotide is represented by a nucleotide sequence comprising or consisting of SEQ ID NO: 272-451 or SEQ ID NO:3185-4527 and is for skipping exon 45 of the pre-mRNA of dystrophin, and comprises one or more of the following:
[0184] at least one 2′-substituted monomer
[0185] at least one phosphorothioate backbone linkage;
[0186] only 2′-substituted monomers;
[0187] only phosphorothioate backbone linkages;
[0188] only 2′-substituted monomers linked by phosphorothioate backbone linkages;
[0189] a 5-methylcytosine and/or a 5-methyluracil base;
[0190] only 5-methylcytosine bases instead of cytosine bases;
[0191] at least one monomer comprising a bicyclic nucleic acid (BNA) scaffold modification.

[0192] Preferably, said oligonucleotide comprises only 2′-substituted monomers, only phosphorothioate backbone linkages, and at least one monomer comprising a BNA scaffold modification. More preferably, said oligonucleotide is represented by a nucleotide sequence comprising or consisting of SEQ ID NO: 273-277, 279-283, 285-289, 291-295, 297-301, 303-307, 309-313, 315-319, 321-325, 327-331, 333-337, 339-343, 345-349, 351-355, 357-361, 363-367, 369-373, 375-379, 381-385, 387-391, 393-397, 399-403, 405-409, 411-415, 417-421, 423-427, 429-433, 435-439, 441-445, or 447-451. Preferably, said oligonucleotide has a length of 10 to 33 nucleotides, most preferably of 16 to 22 nucleotides.

[0193] In a preferred embodiment, an oligonucleotide is represented by a nucleotide sequence comprising or consisting of SEQ ID NO: 452-613 or SEQ ID NO 1592-1605 or SEQ ID NO: 4528-4572 and is for skipping exon 51 of the pre-mRNA of dystrophin, and comprises one or more of the following:
[0194] at least one 2′-substituted monomer
[0195] at least one phosphorothioate backbone linkage;
[0196] only 2′-substituted monomers;
[0197] only phosphorothioate backbone linkages;
[0198] only 2′-substituted monomers linked by phosphorothioate backbone linkages;
[0199] a 5-methylcytosine and/or a 5-methyluracil base;
[0200] only 5-methylcytosine bases instead of cytosine bases;
[0201] at least one monomer comprising a bicyclic nucleic acid (BNA) scaffold modification.

[0202] Preferably, said oligonucleotide comprises only 2′-substituted monomers, only phosphorothioate backbone linkages, and at least one monomer comprising a BNA scaffold modification. More preferably, said oligonucleotide is represented by a nucleotide sequence comprising or consisting of SEQ ID NO: 453-457, 459-463, 465-469, 471-475, 477-481, 483-487, 489-493, 495-499, 501-505, 507-511, 513-517, 519-523, 525-529, 531-535, 537-541, 543-547, 549-553, 555-559, 561-565, 567-571, 573-577, 579-583, 585-589, 591-595, 597-601, 603-607, 609-613, 1592-1605, or 1607, even more preferably SEQ ID NO: 453, 455, 456, 459, 461, 462, 465, 467, 468, 471, 473, 474, 483, 486, 1592, 1593, 1594, 1595, 1596, 1597, 1598, 1599, 1600, 1601, 1602, 1603, 1604, 1605, or 1607 most preferably SEQ ID NO: 1592, 1593, 1594, 1595, 1596, 1597, 1598, 1599, 1600, 1601, 1602, 1603, 1604, 1605, or 1607, even more preferably SEQ ID NO: 455, 459, 4528, 4531, 4532, 4533, 4535, 4542, 4548, and 4568. Preferably, said oligonucleotide has a length of 10 to 33 nucleotides, most preferably of 16 to 22 nucleotides.

[0203] Accordingly, in a preferred embodiment, an oligonucleotide according to the invention is represented by a nucleotide sequence comprising or consisting of SEQ ID NO: 1592 (TCAAGGAAGAUGGCAUUUCU) and is for skipping exon 51 of the pre-mRNA of dystrophin, comprises a BNA scaffold modification in the 5′-terminal monomer and in no other monomers, comprises 5-methylcytosine instead of cytosine, comprises only phosphorothioate linkages, and further comprises only 2′-O-methyl RNA monomers.

[0204] Accordingly, in a preferred embodiment, an oligonucleotide according to the invention is represented by a nucleotide sequence comprising or consisting of SEQ ID NO: 1593 (TCAAGGAAGAUGGCAUUUCT) and is for skipping exon 51 of the pre-mRNA of dystrophin, comprises a BNA scaffold modification in the 5′-terminal monomer and in the 3′-terminal monomer and in no other monomers, comprises 5-methylcytosine instead of cytosine, comprises only phosphorothioate linkages, and further comprises only 2′-O-methyl RNA monomers.

[0205] Accordingly, in a preferred embodiment, an oligonucleotide according to the invention is represented by a nucleotide sequence comprising or consisting of SEQ ID NO: 1594 (TCAAGGAAGAUGGCAUUUCU) and is for skipping exon 51 of the pre-mRNA of dystrophin, comprises a BNA scaffold modification in the 5′-terminal monomer and in its neighbouring monomer and in no other monomers, comprises 5-methylcytosine instead of cytosine, comprises only phosphorothioate linkages, and further comprises only 2′-O-methyl RNA monomers.

[0206] Accordingly, in a preferred embodiment, an oligonucleotide according to the invention is represented by a nucleotide sequence comprising or consisting of SEQ ID NO: 1595 (TCAAGGAAGAUGGCAUUUCUAG) and is for skipping exon 51 of the pre-mRNA of dystrophin, comprises a BNA scaffold modification in the 5′-terminal monomer and in no other monomers, comprises 5-methylcytosine instead of cytosine, comprises only phosphorothioate linkages, and further comprises only 2′-O-methyl RNA monomers.

[0207] Accordingly, in a preferred embodiment, an oligonucleotide according to the invention is represented by a nucleotide sequence comprising or consisting of SEQ ID NO: 1596 (TCAAGGAAGAUGGCAUUUCUAG) and is for skipping exon 51 of the pre-mRNA of dystrophin, comprises a BNA scaffold modification in the 5′-terminal monomer and in the 3′-terminal monomer and in no other monomers, comprises 5-methylcytosine instead of cytosine, comprises only phosphorothioate linkages, and further comprises only 2′-O-methyl RNA monomers.

[0208] Accordingly, in a preferred embodiment, an oligonucleotide according to the invention is represented by a nucleotide sequence comprising or consisting of SEQ ID NO: 1597 (TCAAGGAAGAUGGCAUUUCUAG) and is for skipping exon 51 of the pre-mRNA of dystrophin, comprises a BNA scaffold modification in the 5′-terminal monomer and in its neighbouring monomer and in no other monomers, comprises 5-methylcytosine instead of cytosine, comprises only phosphorothioate linkages, and further comprises only 2′-O-methyl RNA monomers.

[0209] Accordingly, in a preferred embodiment, an oligonucleotide according to the invention is represented by a nucleotide sequence comprising or consisting of SEQ ID NO: 1598 (AAGGAAGAUGGCAUUUCU) and is for skipping exon 51 of the pre-mRNA of dystrophin, comprises a BNA scaffold modification in the 5′-terminal monomer and in no other monomers, comprises 5-methylcytosine instead of cytosine, comprises only phosphorothioate linkages, and further comprises only 2′-O-methyl RNA monomers.

[0210] Accordingly, in a preferred embodiment, an oligonucleotide according to the invention is represented by a nucleotide sequence comprising or consisting of SEQ ID NO: 1599 (AAGGAAGAUGGCAUUUCT) and is for skipping exon 51 of the pre-mRNA of dystrophin, comprises a BNA scaffold modification in the 5′-terminal monomer and in the 3′-terminal monomer and in no other monomers, comprises 5-methylcytosine instead of cytosine, comprises only phosphorothioate linkages, and further comprises only 2′-O-methyl RNA monomers.

[0211] Accordingly, in a preferred embodiment, an oligonucleotide according to the invention is represented by a nucleotide sequence comprising or consisting of SEQ ID NO: 1600 (AAGGAAGAUGGCAUUUCU) and is for skipping exon 51 of the pre-mRNA of dystrophin, comprises a BNA scaffold modification in the 5′-terminal monomer and in its neighbouring monomer and in no other monomers, comprises 5-methylcytosine instead of cytosine, comprises only phosphorothioate linkages, and further comprises only 2′-O-methyl RNA monomers.

[0212] Accordingly, in a preferred embodiment, an oligonucleotide according to the invention is represented by a nucleotide sequence comprising or consisting of SEQ ID NO: 1601 (GGAAGAUGGCAUUUCU) and is for skipping exon 51 of the pre-mRNA of dystrophin, comprises a BNA scaffold modification in the 5′-terminal monomer and in no other monomers, comprises 5-methylcytosine instead of cytosine, comprises only phosphorothioate linkages, and further comprises only 2′-O-methyl RNA monomers.

[0213] Accordingly, in a preferred embodiment, an oligonucleotide according to the invention is represented by a nucleotide sequence comprising or consisting of SEQ ID NO: 1602 (GGAAGAUGGCAUUUCT) and is for skipping exon 51 of the pre-mRNA of dystrophin, comprises a BNA scaffold modification in the 5′-terminal monomer and in the 3′-terminal monomer and in no other monomers, comprises 5-methylcytosine instead of cytosine, comprises only phosphorothioate linkages, and further comprises only 2′-O-methyl RNA monomers.

[0214] Accordingly, in a preferred embodiment, an oligonucleotide according to the invention is represented by a nucleotide sequence comprising or consisting of SEQ ID NO: 1603 (GGAAGAUGGCAUUUCU) and is for skipping exon 51 of the pre-mRNA of dystrophin, comprises a BNA scaffold modification in the 5′-terminal monomer and in its neighbouring monomer and in no other monomers, comprises 5-methylcytosine instead of cytosine, comprises only phosphorothioate linkages, and further comprises only 2′-O-methyl RNA monomers.

[0215] Accordingly, in a preferred embodiment, an oligonucleotide according to the invention is represented by a nucleotide sequence comprising or consisting of SEQ ID NO: 1604 (TCAAGGAAGAUGGCAU) and is for skipping exon 51 of the pre-mRNA of dystrophin, comprises a BNA scaffold modification in the 5′-terminal monomer and in no other monomers, comprises 5-methylcytosine instead of cytosine, comprises only phosphorothioate linkages, and further comprises only 2′-O-methyl RNA monomers.

[0216] Accordingly, in a preferred embodiment, an oligonucleotide according to the invention is represented by a nucleotide sequence comprising or consisting of SEQ ID NO: 1605 (TCAAGGAAGAUGGCAU) and is for skipping exon 51 of the pre-mRNA of dystrophin, comprises a BNA scaffold modification in the 5′-terminal monomer and in its neighbouring monomer and in no other monomers, comprises 5-methylcytosine instead of cytosine, comprises only phosphorothioate linkages, and further comprises only 2′-O-methyl RNA monomers.

[0217] Accordingly, in a preferred embodiment, an oligonucleotide according to the invention is represented by a nucleotide sequence comprising or consisting of SEQ ID NO: 1607 (CUCCAACAUCAAGGAAGAUGGCAUUUCUAG) and is for skipping exon 51 of the pre-mRNA of dystrophin, comprises no BNA scaffold modification in any monomers, comprises cytosine, comprises only phosphorothioate linkages, and further comprises only 2′-O-methyl RNA monomers.

[0218] Accordingly, in a preferred embodiment, an oligonucleotide according to the invention is represented by a nucleotide sequence comprising or consisting of SEQ ID NO: 1607 (CUCCAACAUCAAGGAAGAUGGCAUUUCUAG) and is for skipping exon 51 of the pre-mRNA of dystrophin, comprises at least one BNA scaffold modification in any monomer, preferably only in either the 5′terminal monomer, the 3′-terminal monomer, both the 5′-terminal and in the 3′-terminal monomer, the two most 5′-terminal monomers, or the two most 3′-terminal monomers, comprises cytosine, comprises only phosphorothioate linkages, and further comprises only 2′-O-methyl RNA monomers.

[0219] Accordingly, in a preferred embodiment, an oligonucleotide according to the invention is represented by a nucleotide sequence comprising or consisting of SEQ ID NO: 455 (TCAAGGAAGAUGGCAUUUCT) and is for skipping exon 51 of the pre-mRNA of dystrophin, comprises a BNA scaffold modification in the 5′-terminal monomer and in the 3′-terminal monomer and in no other monomers, comprises 5-methylcytosine instead of cytosine, comprises only phosphorothioate linkages, and further comprises only 2′-O-methyl RNA monomers.

[0220] Accordingly, in a preferred embodiment, an oligonucleotide according to the invention is represented by a nucleotide sequence comprising or consisting of SEQ ID NO: 459 (TCAAGGAAGAUGGCAUUUCUAG) and is for skipping exon 51 of the pre-mRNA of dystrophin, comprises a BNA scaffold modification in the 5′-terminal monomer and in no other monomers, comprises 5-methylcytosine instead of cytosine, comprises only phosphorothioate linkages, and further comprises only 2′-O-methyl RNA monomers.

[0221] Accordingly, in a preferred embodiment, an oligonucleotide according to the invention is represented by a nucleotide sequence comprising or consisting of SEQ ID NO: 4528 (TCAAGGAAGAUGGCAUUUCUAG) and is for skipping exon 51 of the pre-mRNA of dystrophin, comprises a BNA scaffold modification in the 5′-terminal monomer, its neighbouring monomer, and its 3′-terminal monomer, and in no other monomers, comprises 5-methylcytosine instead of cytosine, comprises only phosphorothioate linkages, and further comprises only 2′-O-methyl RNA monomers.

[0222] Accordingly, in a preferred embodiment, an oligonucleotide according to the invention is represented by a nucleotide sequence comprising or consisting of SEQ ID NO: 4531 (TCAAGGAAGAUGGCAUUUCUAG) and is for skipping exon 51 of the pre-mRNA of dystrophin, comprises a BNA scaffold modification in the 5′-terminal monomer, its neighbouring monomer, in the 13^{th} monomer from the 5′-terminus, and in its 3′-terminal monomer, and in no other monomers, comprises 5-methylcytosine instead of cytosine, comprises only phosphorothioate linkages, and further comprises only 2′-O-methyl RNA monomers.

[0223] Accordingly, in a preferred embodiment, an oligonucleotide according to the invention is represented by a nucleotide sequence comprising or consisting of SEQ ID NO: 4532 (TCAAGGAAGAUGGCAUUUCUAG) and is for skipping exon 51 of the pre-mRNA of dystrophin, comprises a BNA scaffold modification in the 5′-terminal monomer, its neighbouring monomer, in the 9^{th} monomer from the 5′-terminus, and in its 3′-terminal monomer, and in no other monomers, comprises 5-methylcytosine instead of cytosine, comprises only phosphorothioate linkages, and further comprises only 2′-O-methyl RNA monomers.

[0224] Accordingly, in a preferred embodiment, an oligonucleotide according to the invention is represented by a nucleotide sequence comprising or consisting of SEQ ID NO: 4533 (TCAAGGAAGAUGGCAUUUCUAG) and is for skipping exon 51 of the pre-mRNA of dystrophin, comprises a BNA scaffold modification in the 5′-terminal monomer, its neighbouring monomer, in the 9^{th} monomer from the 5′-terminus, in the 13^{th} monomer from the 5′-terminus, and in its 3′-terminal monomer, and in no other monomers, comprises 5-methylcytosine instead of cytosine, comprises only phosphorothioate linkages, and further comprises only 2′-O-methyl RNA monomers.

[0225] Accordingly, in a preferred embodiment, an oligonucleotide according to the invention is represented by a nucleotide sequence comprising or consisting of SEQ ID NO: 4535 (TCAAGGAAGAUGGCAUUUCT) and is for skipping exon 51 of the pre-mRNA of dystrophin, comprises a BNA scaffold modification in the 5′-terminal monomer, in its neighbouring monomer, and in its 3′-terminal monomer, and in no other monomers, comprises 5-methylcytosine instead of cytosine, comprises only phosphorothioate linkages, and further comprises only 2′-O-methyl RNA monomers.

[0226] Accordingly, in a preferred embodiment, an oligonucleotide according to the invention is represented by a nucleotide sequence comprising or consisting of SEQ ID NO: 4542 (TCAAGGAAGAUGGCAUUUCT) and is for skipping exon 51 of the pre-mRNA of dystrophin, comprises a BNA scaffold modification in the 5′-terminal monomer, in its 13^{th} monomer from the 5′-terminus, and in its 3′-terminal monomer, and in no other monomers, comprises 5-methylcytosine instead of cytosine, comprises only phosphorothioate linkages, and further comprises only 2′-O-methyl RNA monomers.

[0227] Accordingly, in a preferred embodiment, an oligonucleotide according to the invention is represented by a nucleotide sequence comprising or consisting of SEQ ID NO: 4548 (CAAGGAAGAUGGCAUUUCT) and is for skipping exon 51 of the pre-mRNA of dystrophin, comprises a BNA scaffold modification in the 5′-terminal monomer, in its neighbouring monomer, in its 8^{th} monomer from the 5′-terminus, in its 12^{th} monomer from the 5′-terminus, and in its 3′-terminal monomer, and in no other monomers, comprises 5-methylcytosine instead of cytosine, comprises only phosphorothioate linkages, and further comprises only 2′-O-methyl RNA monomers.

[0228] Accordingly, in a preferred embodiment, an oligonucleotide according to the invention is represented by a nucleotide sequence comprising or consisting of SEQ ID NO: 4568 (GGUAAGUUCUGUCCAAGC) and is for skipping exon 51 of the pre-mRNA of dystrophin, comprises a BNA scaffold modification in the 5′-terminal monomer, in its neighbouring monomer, in its 6^{th} monomer from the 5′-terminus, and in its 3′-terminal monomer, and in no other monomers, comprises 5-methylcytosine instead of cytosine, comprises only phosphorothioate linkages, and further comprises only 2′-O-methyl RNA monomers.

[0229] In a preferred embodiment, an oligonucleotide is represented by a nucleotide sequence comprising or consisting of SEQ ID NO: 614-841 and is for skipping exon 52 of the pre-mRNA of dystrophin, and comprises one or more of the following:
[0230] at least one 2′-substituted monomer
[0231] at least one phosphorothioate backbone linkage;
[0232] only 2′-substituted monomers;
[0233] only phosphorothioate backbone linkages;
[0234] only 2′-substituted monomers linked by phosphorothioate backbone linkages;
[0235] a 5-methylcytosine and/or a 5-methyluracil base;
[0236] only 5-methylcytosine bases instead of cytosine bases;
[0237] at least one monomer comprising a bicyclic nucleic acid (BNA) scaffold modification.

[0238] Preferably, said oligonucleotide comprises only 2′-substituted monomers, only phosphorothioate backbone linkages, and at least one monomer comprising a BNA scaffold modification. More preferably, said oligonucleotide is represented by a nucleotide sequence comprising or consisting of SEQ ID NO: 615-619, 621-625, 627-631, 633-637, 639-643, 645-649, 651-655, 657-661, 663-667, 669-673, 675-679, 681-685, 687-691, 693-697, 699-703, 705-709, 711-715, 717-721, 723-727, 729-733, 735-739, 741-745, 747-751, 753-757, 759-763, 765-769, 771-775, 777-781, 783-787, 789-793, 795-799, 801-805, 807-811, 813-817, 819-823, 825-829, 831-835, or 837-841. Preferably, said oligonucleotide has a length of 10 to 33 nucleotides, most preferably of 16 to 22 nucleotides.

[0239] In a preferred embodiment, an oligonucleotide is represented by a nucleotide sequence comprising or consisting of SEQ ID NO: 842-1159 or SEQ ID NO:4573-6048 and is for skipping exon 53 of the pre-mRNA of dystrophin, and comprises one or more of the following:
[0240] at least one 2′-substituted monomer
[0241] at least one phosphorothioate backbone linkage;
[0242] only 2′-substituted monomers;
[0243] only phosphorothioate backbone linkages;
[0244] only 2′-substituted monomers linked by phosphorothioate backbone linkages;
[0245] a 5-methylcytosine and/or a 5-methyluracil base;
[0246] only 5-methylcytosine bases instead of cytosine bases;
[0247] at least one monomer comprising a bicyclic nucleic acid (BNA) scaffold modification.

[0248] Preferably, said oligonucleotide comprises only 2′-substituted monomers, only phosphorothioate backbone linkages, and at least one monomer comprising a BNA scaffold modification. More preferably, said oligonucleotide is represented by a nucleotide sequence comprising or consisting of SEQ ID NO: 843-847, 849-853, 855-859, 861-865, 867-871, 873-877, 879-883, 885-889, 891-895, 897-901, 903-907, 909-913, 915-919, 921-925, 927-931, 933-937, 939-943, 945-949, 951-955, 957-961, 963-967, 969-973, 975-979, 981-985, 987-991, 993-997, 999-1003, 1005-1009, 1011-1015, 1017-1021, 1023-1027, 1029-1033, 1035-1039, 1041-1045, 1047-1051, 1053-1057, 1059-1063, 1065-1069, 1071-1075, 1077-1081, 1083-1087, 1089-1093, 1095-1099, 1101-1105, 1107-1111, 1113-1117, 1119-1123, 1125-1129, 1131-1135, 1137-1141, 1143-1147, 1149-1153, or 1155-1159. Preferably, said oligonucleotide has a length of 10 to 33 nucleotides, most preferably of 16 to 22 nucleotides.

[0249] In a preferred embodiment, an oligonucleotide is represented by a nucleotide sequence comprising or consisting of SEQ ID NO: 1160-1399 and is for skipping exon 55 of the pre-mRNA of dystrophin, and comprises one or more of the following:
[0250] at least one 2′-substituted monomer
[0251] at least one phosphorothioate backbone linkage;
[0252] only 2′-substituted monomers;
[0253] only phosphorothioate backbone linkages;
[0254] only 2′-substituted monomers linked by phosphorothioate backbone linkages;
[0255] a 5-methylcytosine and/or a 5-methyluracil base;
[0256] only 5-methylcytosine bases instead of cytosine bases;
[0257] at least one monomer comprising a bicyclic nucleic acid (BNA) scaffold modification.

[0258] Preferably, said oligonucleotide comprises only 2′-substituted monomers, only phosphorothioate backbone linkages, and at least one monomer comprising a BNA scaffold modification. More preferably, said oligonucleotide is represented by a nucleotide sequence comprising or consisting of SEQ ID NO: 1161-1165, 1167-1171, 1173-1177, 1179-1183, 1185-1189, 1191-1195, 1197-1201, 1203-1207, 1209-1213, 1215-1219, 1221-1225, 1227-1231, 1233-1237, 1239-1243, 1245-1249, 1251-1255, 1257-1261, 1263-1267, 1269-1273, 1275-1279, 1281-1285, 1287-1291, 1293-1297, 1299-1303, 1305-1309, 1311-1315, 1317-1321, 1323-1327, 1329-1333, 1335-1339, 1341-1345, 1347-1351, 1353-1357, 1359-1363, 1365-1369, 1371-1375, 1377-1381, 1383-1387, 1389-1393, or 1395-1399. Preferably, said oligonucleotide has a length of 10 to 33 nucleotides, most preferably of 16 to 22 nucleotides.

[0259] In a preferred embodiment, an oligonucleotide is represented by a nucleotide sequence comprising or consisting of SEQ ID NO: 1400-1579 and is for including exon 7 of the pre-mRNA of SMN2, and comprises one or more of the following:
[0260] at least one 2′-substituted monomer
[0261] at least one phosphorothioate backbone linkage;
[0262] only 2′-substituted monomers;
[0263] only phosphorothioate backbone linkages;
[0264] only 2′-substituted monomers linked by phosphorothioate backbone linkages;
[0265] a 5-methylcytosine and/or a 5-methyluracil base;
[0266] only 5-methylcytosine bases instead of cytosine bases;
[0267] at least one monomer comprising a bicyclic nucleic acid (BNA) scaffold modification.

[0268] Preferably, said oligonucleotide comprises only 2′-substituted monomers, only phosphorothioate backbone linkages, and at least one monomer comprising a BNA scaffold modification. Most preferably, said oligonucleotide is represented by a nucleotide sequence comprising or consisting of SEQ ID NO: 1606, wherein it comprises no BNA scaffold modification, or comprising or consisting of SEQ ID NO: 1490, wherein it comprises BNA scaffold modifications in any monomer, preferably only in either the 5′terminal monomer, the 3′-terminal monomer, both the 5′-terminal and in the 3′-terminal monomer, the two most 5′-terminal monomers, or the two most 3′-terminal monomers. Preferably, said oligonucleotide has a length of 10 to 33 nucleotides, most preferably of 16 to 22 nucleotides.

[0269] In a preferred embodiment, an oligonucleotide is represented by a nucleotide sequence comprising or consisting of SEQ ID NO: 1400-1441 and is for targeting intron 6 of the pre-mRNA of SMN2, and comprises one or more of the following:
[0270] at least one 2′-substituted monomer
[0271] at least one phosphorothioate backbone linkage;
[0272] only 2′-substituted monomers;
[0273] only phosphorothioate backbone linkages;
[0274] only 2′-substituted monomers linked by phosphorothioate backbone linkages;
[0275] a 5-methylcytosine and/or a 5-methyluracil base;
[0276] only 5-methylcytosine bases instead of cytosine bases;
[0277] at least one monomer comprising a bicyclic nucleic acid (BNA) scaffold modification.

[0278] Preferably, said oligonucleotide comprises only 2′-substituted monomers, only phosphorothioate backbone linkages, and at least one monomer comprising a BNA scaffold modification. More preferably, said oligonucleotide is represented by a nucleotide sequence comprising or consisting of SEQ ID NO: 1401-1405, 1407-1411, 1413-1417, 1419-1423, 1425-1429, 1431-1435, 1437-1441. Preferably, said oligonucleotide has a length of 10 to 33 nucleotides, most preferably of 16 to 22 nucleotides.

[0279] In a preferred embodiment, an oligonucleotide is represented by a nucleotide sequence comprising or consisting of SEQ ID NO: 1442-1579 and is for targeting intron 7 of the pre-mRNA of SMN2, and comprises one or more of the following:
[0280] at least one 2′-substituted monomer
[0281] at least one phosphorothioate backbone linkage;
[0282] only 2′-substituted monomers;
[0283] only phosphorothioate backbone linkages;
[0284] only 2′-substituted monomers linked by phosphorothioate backbone linkages;
[0285] a 5-methylcytosine and/or a 5-methyluracil base;
[0286] only 5-methylcytosine bases instead of cytosine bases;
[0287] at least one monomer comprising a bicyclic nucleic acid (BNA) scaffold modification.

[0288] Preferably, said oligonucleotide comprises only 2′-substituted monomers, only phosphorothioate backbone linkages, and at least one monomer comprising a BNA scaffold modification. More preferably, said oligonucleotide is represented by a nucleotide sequence comprising or consisting of SEQ ID NO: 1443-1447, 1449-1453, 1455-1459, 1461-1465, 1467-1471, 1473-1477, 1479-1483, 1485-1489, 1491-1495, 1497-1501, 1503-1507, 1509-1513, 1515-1519, 1521-1525, 1527-1531, 1533-1537, 1539-1543, 1545-1549, 1551-1555, 1557-1561, 1563-1567, 1569-1573, 1575-1579. Most preferably, said oligonucleotide is represented by a nucleotide sequence comprising or consisting of SEQ ID NO: 1490, wherein it comprises BNA scaffold modifications in any monomer, preferably only in either the 5′terminal monomer, the 3′-terminal monomer, both the 5′-terminal and in the 3′-terminal monomer, the two most 5′-terminal monomers, or the two most 3′-terminal monomers. Preferably, said oligonucleotide has a length of 10 to 33 nucleotides, more preferably of 16 to 22 nucleotides, most preferably 18 monomers.

[0289] In a preferred embodiment, an oligonucleotide according to the invention is represented by a nucleotide sequence comprising or consisting of SEQ ID NO: 1606 (UCACUUUCAUAAUGCUGG) and is for targeting intron 7 of the pre-mRNA of SMN2, comprises no BNA scaffold modification in any monomers, comprises 5-methylcytosine instead of cytosine, comprises only phosphorothioate linkages, and further comprises only 2′-O-methyl RNA monomers.

[0290] In preferred embodiments the oligonucleotide according to the invention is one wherein said oligonucleotide has an improved parameter by comparison to a corresponding oligonucleotide that does not comprise a bicyclic nucleic acid (BNA) scaffold modification. We discovered that the presence of a BNA with 5-methylcytosine or 5-methyluracil in an oligonucleotide of the invention has a positive effect on at least one of the parameters of said oligonucleotides. In this context, parameters may include: binding affinity and/or kinetics, exon skipping activity, biostability, (intra-tissue) distribution, cellular uptake and/or trafficking, and/or immunogenicity of said oligonucleotide, as explained below.

[0291] Binding affinity and kinetics depend on the thermodynamic properties of the oligonucleotide. These are at least in part determined by the melting temperature of said oligonucleotide (Tm; calculated with e.g. the oligonucleotide properties calculator (accessible via the internet at for example www.unc.edu/˜cail/biotool/oligo/index.html or at for example eu.idtdna.com/analyzer/Applications/OligoAnalyzer/) for single stranded RNA using the basic Tm and the nearest neighbor model), and/or the free energy of the oligonucleotide-target exon complex (using RNA structure version 4.5 or RNA mfold version 3.5). If a Tm is increased, the exon skipping activity typically increases, but when a Tm is too high, the oligonucleotide is expected to become less sequence-specific. An acceptable Tm and free energy depend on the sequence of the oligonucleotide. Therefore, it is difficult to give preferred ranges for each of these parameters.

[0292] Exon skipping activity is preferably measured by analysing total RNA isolated from oligonucleotide-treated muscle cell cultures or muscle tissue by reverse transcriptase quantitative or digital droplet polymerase chain reaction (RT-qPCR or RT-ddPCR) using DMD gene-specific primers flanking the targeted exon as described (Aartsma-Rus et al., 2003, Spitali et al., 2013). The ratio of shorter transcript fragments, representing transcripts in which the targeted exon is skipped, to the total of transcript products is assessed (calculated as percentage of exon skipping induced by an oligonucleotide). Shorter fragments may also be sequenced to determine the correctness and specificity of the targeted exon skipping.

[0293] In certain embodiments, RNA modulation activity may be an increase or decrease in an amount of a nucleic acid or protein. In certain embodiments, such activity may be a change in the ratio of splice variants of a nucleic acid or protein. Detection and/or measuring of antisense activity may be direct or indirect. In certain embodiments, antisense activity is assessed by observing a phenotypic change in a cell or animal.

[0294] As used herein and explained above, “modulation” can refer to a perturbation of amount or quality of a function or activity when compared to the function or activity prior to modulation. For example, modulation includes the change, either an increase (stimulation or induction) or a decrease (inhibition or reduction) in gene expression. As a further example, modulation of expression can include perturbing splice site selection of pre-mRNA processing, resulting in a change in the amount of a particular splice-variant present compared to conditions that were not perturbed. As a further example, modulation includes perturbing translation of a protein.

[0295] Biodistribution and biostability are preferably at least in part determined by a validated hybridization ligation assay adapted from Yu et al., 2002. In an embodiment, plasma or homogenized tissue samples are incubated with a specific capture oligonucleotide probe. After separation, a DIG-labeled oligonucleotide is ligated to the complex and detection followed using an anti-DIG antibody-linked peroxidase. Non-compartmental pharmacokinetic analysis is performed using WINNONLIN software package (model 200, version 5.2, Pharsight, Mountainview, Calif.). Levels of oligonucleotide (μg) per mL plasma or mg tissue are monitored over time to assess area under the curve (AUC), peak concentration (Cₘₐₓ), time to peak concentration (Tₘₐₓ), terminal half life and absorption lag time (t_{lag}). Such a preferred assay has been disclosed in the experimental part.

[0296] Accordingly, a preferred oligonucleotide of the invention has an improved parameter, such as an acceptable or a decreased immunogenicity and/or a better biodistribution and/or acceptable or improved RNA binding kinetics and/or thermodynamic properties by comparison to a corresponding oligonucleotide that differs only from the oligonucleotide of the invention through omission of BNA scaffold modifications, i.e. by comparison to an oligonucleotide of the same sequence, also comprising 2′-O-methyl substituted monomers, 5′-methylcytosine and/or 5′-methyluracil, optionally phosphorothioate, yet without a BNA modified scaffold. Each of these parameters could be assessed using assays known to the skilled person or preferably as disclosed herein.

### Further Chemical Modifications of the Oligonucleotide

[0297] Below other chemistries and modifications of the oligonucleotide of the invention are defined. These additional chemistries and modifications may be present in combination with the chemistry already defined for said oligonucleotide, i.e. the presence of at least 1 BNA scaffold modification with or without a 5-methylcytosine and/or a 5-methyluracil, and/or the oligonucleotide comprising or consisting of a 2′-O-methyl monomer with optional phosphorothioate backbone linkages.

[0298] A preferred oligonucleotide of the invention comprises or consists of an RNA molecule or a modified RNA molecule. In a preferred embodiment, an oligonucleotide is single stranded. The skilled person will understand that it is however possible that a single stranded oligonucleotide may form an internal double stranded structure. However, this oligonucleotide is still named a single stranded oligonucleotide in the context of this invention.

[0299] In addition to the modifications described above, the oligonucleotide of the invention may comprise further modifications such as different types of nucleic acid monomers or nucleotides as described below. Different types of nucleic acid monomers may be used to generate an oligonucleotide of the invention. Said oligonucleotide may have at least one backbone, and/or scaffold modification and/or at least one base modification compared to an RNA-based oligonucleotide.

[0300] A base modification can include a modified version of the natural purine and pyrimidine bases (e.g. adenine, uracil, guanine, cytosine, and thymine), such as hypoxanthine, pseudouracil, pseudocytosine, 1-methylpseudouracil, orotic acid, agmatidine, lysidine, 2-thiopyrimidine (e.g. 2-thiouracil, 2-thiothymine), G-clamp and its derivatives, 5-substituted pyrimidine (e.g. 5-halouracil, 5-halomethyluracil, 5-trifluoromethyluracil, 5-propynyluracil, 5-propynylcytosine, 5-aminomethyluracil, 5-hydroxymethyluracil, 5-aminomethylcytosine, 5-hydroxymethylcytosine, Super T, or as described in e.g. Kumar et al. J. Org. Chem. 2014, 79, 5047; Leszczynska et al. Org. Biol. Chem. 2014, 12, 1052), pyrazolo[1,5-a]-1,3,5-triazine C-nucleoside (as in e.g. Lefoix et al. J. Org. Chem. 2014, 79, 3221), 7-deazaguanine, 7-deazaadenine, 7-aza-2,6-diaminopurine, 8-aza-7-deazaguanine, 8-aza-7-deazaadenine, 8-aza-7-deaza-2,6-diaminopurine, Super G, Super A, boronated cytosine (as in e.g. Nizio et al. Bioorg. Med. Chem. 2014, 22, 3906), pseudoisocytidine, C(Pyc) (as in e.g. Yamada et al. Org. Biomol. Chem. 2014, 12, 2255) and N4-ethylcytosine, or derivatives thereof; N²-cyclopentylguanine (cPent-G), N²-cyclopentyl-2-aminopurine (cPent-AP), and N²-propyl-2-aminopurine (Pr-AP), carbohydrate-modified uracil (as in e.g. Kaura et al. Org. Lett. 2014, 16, 3308), amino acid modified uracil (as in e.g. Guenther et al. Chem. Commun. 2014, 50, 9007); or derivatives thereof; and degenerate or universal bases, like 2,6-difluorotoluene or absent bases like abasic sites (e.g. 1-deoxyribose, 1,2-dideoxyribose, 1-deoxy-2-O-methylribose; or pyrrolidine derivatives in which the ring oxygen has been replaced with nitrogen (azaribose)). Examples of derivatives of Super A, Super G and Super T can be found in U.S. Pat. No. 6,683,173 (Epoch Biosciences), which is incorporated here entirely by reference. cPent-G, cPent-AP and Pr-AP were shown to reduce immunostimulatory effects when incorporated in siRNA (Peacock H. et al. J. Am. Chem. Soc. 2011, 133, 9200). Examples of modified bases are described in e.g. WO2014/093924 (ModeRNA).

[0301] Depending on its length an oligonucleotide of the invention may comprise 1, 2, 3, 4, 5, 6, 7, 8, 9, 10, 11, 12, 13, 14, 15, 16, 17, 18, 19, 20, 21, 22, 23, 24, 25, 26, 27, 28, 29, 30, 31, 32, 33, or 34 base modifications. It is also encompassed by the invention to introduce more than one distinct base modification in said oligonucleotide.

[0302] In addition to BNA scaffold modifications already described, a scaffold modification can include a modified version of the ribosyl moiety, such as 2′-O-modified RNA such as 2′-O-alkyl or 2′-O-(substituted)alkyl e.g. 2′-O-methyl, 2′-O-(2-cyanoethyl), 2′-O-(2-methoxy)ethyl (2′-MOE), 2′-O-(2-thiomethyl)ethyl, 2′-O-butyryl, 2′-O-propargyl, 2′-O-acetalester (such as e.g. Biscans et al. Bioorg. Med. Chem. 2015, 23, 5360), 2′-O-allyl, 2′-O-(2S-methoxypropyl), 2′-O—(N-(aminoethyl)carbamoyl)methyl) (2′-AECM), 2′-O-(2-carboxyethyl) and carbamoyl derivatives (Yamada et al. Org. Biomol. Chem. 2014, 12, 6457), 2′-O-(2-amino)propyl, 2′-O-(2-(dimethylamino)propyl), 2′-O-(2-amino)ethyl, 2′-O-(2-(dimethylamino)ethyl); 2′-deoxy (DNA); 2′-O-(haloalkoxy)methyl (Arai K. et al. Bioorg. Med. Chem. 2011, 21, 6285) e.g. 2′-O-(2-chloroethoxy)methyl (MCEM), 2′-O-(2,2-dichloroethoxy)methyl (DCEM); 2′-O-alkoxycarbonyl e.g. 2′-O-[2-(methoxycarbonyl)ethyl] (MOCE), 2′-O-[2-(N-methylcarbamoyl)ethyl] (MCE), 2′-O-[2-(N,N-dimethylcarbamoyl)ethyl] (DCME), 2′-O-[2-(methylthio)ethyl] (2′-MTE), 2′-(ω-O-serinol); 2′-halo e.g. 2′-F, FANA (2′-F arabinosyl nucleic acid); 2′,4′-difluoro-2′-deoxy; carbasugar and azasugar modifications; 3′-O-substituted e.g. 3′-O-methyl, 3′-O-butyryl, 3′-O-propargyl; 4′-substituted e.g. 4′-aminomethyl-2′-O-methyl or 4′-aminomethyl-2′-fluoro; 5′-substituted e.g. 5′-methyl or CNA (Østergaard et al. ACS Chem. Biol. 2014, 22, 6227); and their derivatives.

[0303] Depending on its length an oligonucleotide of the invention may comprise 1, 2, 3, 4, 5, 6, 7, 8, 9, 10, 11, 12, 13, 14, 15, 16, 17, 18, 19, 20, 21, 22, 23, 24, 25, 26, 27, 28, 29, 30, 31, or 32, or 33 scaffold modifications additional to the at least 1 BNA scaffold modification. It is also encompassed by the invention to introduce more than one distinct scaffold modification in said oligonucleotide.

[0304] Other modifications include unlocked nucleic acid (UNA); cyclohexenyl nucleic acid (CeNA), F-CeNA, cyclohexanyl nucleic acid (CNA), ribo-cyclohexanyl nucleic acid (r-CNA), altritol nucleic acid (ANA), hexitol nucleic acid (HNA), fluorinated HNA (F-HNA), pyranosyl-RNA (p-RNA), 3′-deoxypyranosyl-DNA (p-DNA); and their derivatives. Examples of fluorinated nucleic acid analogues with furanose and non-furanose sugar rings are also encompassed and are described in e.g. Østergaard et al. J. Org. Chem. 2014, 79, 8877.

[0305] Depending on its length an oligonucleotide of the invention may comprise 1, 2, 3, 4, 5, 6, 7, 8, 9, 10, 11, 12, 13, 14, 15, 16, 17, 18, 19, 20, 21, 22, 23, 24, 25, 26, 27, 28, 29, 30, 31, 32, 33, or 34 scaffold modifications in addition to the at least 1 BNA scaffold modification. In a preferred embodiment, an oligonucleotide of the invention is fully 2′-O-methyl modified and contains 1, 2, 3, 4, 5, or 6 BNA scaffold modifications.

[0306] Oligonucleotides according to the invention can comprise backbone linkage modifications. A backbone linkage modification can be, but is not limited to, a modified version of the phosphodiester present in RNA, such as phosphorothioate (PS), chirally pure phosphorothioate, (R)-phosphorothioate, (S)-phopshorothioate, phosphorodithioate (PS2), phosphonoacetate (PACE), phosphonoacetamide (PACA), thiophosphonoacetate (thioPACE), thiophosphonoacetamide, phosphorothioate prodrug, H-phosphonate, methyl phosphonate, methyl phosphonothioate, methyl phosphate, methyl phosphorothioate, ethyl phosphate, ethyl phosphorothioate, boranophosphate, boranophosphorothioate, methyl boranophosphate, methyl boranophosphorothioate, methyl boranophosphonate, methyl boranophosphonothioate, phosphate, phosphotriester, aminoalkylphosphotriester, and their derivatives. Another modification includes phosphoryl guanidine, phosphoramidite, phosphoramidate, N3′→P5′ phosphoramidate, phosphordiamidate, phosphorothiodiamidate, sulfamate, dimethylenesulfoxide, amide, sulfonate, siloxane, sulfide, sulfone, formacetyl, thioformacetyl, methylene formacetyl, alkenyl, methylenehydrazino, sulfonamide, amide, triazole, oxalyl, carbamate, methyleneimino (MMI), and thioacetamido nucleic acid (TANA); and their derivatives. Examples of chirally pure phosphorothioate linkages are described in e.g. WO2014/010250 or WO2017/062862 (WaVe Life Sciences). Examples of phosphoryl guanidine linkages are described in WO2016/028187 (Noogen). Various salts, mixed salts and free acid forms are also included, as well as 3′→3′ and 2′→5′ linkages.

[0307] Depending on its length, an oligonucleotide of the invention may comprise 1, 2, 3, 4, 5, 6, 7, 8, 9, 10, 11, 12, 13, 14, 15, 16, 17, 18, 19, 20, 21, 22, 23, 24, 25, 26, 27, 28, 29, 30, 31, 32, or 33 backbone linkage modifications. It is also encompassed by the invention to introduce more than one distinct backbone modification in said oligonucleotide.

[0308] In a preferred embodiment, an oligonucleotide of the invention comprises at least one phosphorothioate modification. In a more preferred embodiment, an oligonucleotide of the invention is fully phosphorothioate modified. In another preferred embodiment, an oligonucleotide of the invention comprises at least one phosphate.

[0309] Other chemical modifications of an oligonucleotide of the invention include the substitution of one or more than one of any of the hydrogen atoms with deuterium or tritium, examples of which can be found in e.g. WO2014/022566 (Ased) or WO2015/011694 (Celgene).

[0310] With the advent of nucleic acid mimicking technology it has become possible to generate molecules that have a similar, preferably the same hybridization characteristics in kind not necessarily in amount as nucleic acid itself. Such functional equivalents are of course also suitable for use in the invention.

[0311] The skilled person will understand that not each scaffold, base, and/or backbone may be modified the same way. Several distinct modified scaffolds, bases and/or backbones may be combined into one single oligonucleotide of the invention.

[0312] In one embodiment, the oligonucleotides according to the invention are 10 to 33 nucleotides in length, wherein:

[0313] a) at least one monomer has formula I:

[chemical structure]

[0314] wherein:

[0315] B is a nucleobase;

[0316] X is F, —NR¹R², or —OR;

[0317] R is alkenyl or optionally substituted alkyl, where the optional substituents, when present, are halo, OR¹, NR¹R², or SR¹;

[0318] R¹ is H, alkyl, cycloalkyl, aryl, heterocycloalkyl, or heteroaryl, each independently optionally further substituted with halo, hydroxy, or alkyl;

[0319] R² is H or alkyl; and

[chemical structure]

[0320] indicates the point of attachment to the remainder of the oligonucleotide;

[0321] b) wherein at least one monomer comprises a BNA scaffold modification and has formula II:

[chemical structure]

[0322] wherein:

[0323] B¹ is a nucleobase;

[0324] Z—Y is a divalent group selected from —(CH₂)ₙO—, —C(CH₂CH₂)O—, —CH₂WCH₂—, —(CH₂)ₙNR³—, —CH₂S(Oₘ)—, —CH(CH₃)O—, —CH(CH₂OCH₃)O—, —CH₂N(R³)O—, —CH₂CH₂—, —C(O)NR³—, —CH═CHO—, —CH₂SO₂NR³—, and —NHC(O)NH—;

[0325] n is 1 or 2;

[0326] m is 0, 1 or 2;

[0327] W is O, S or NR³;

[0328] R³ is H, —C(O)R⁴, —C(═NH)NR⁵R⁵, benzyl, or optionally substituted alkyl, where the optional substituents, when present, are selected from halo and alkoxy;

[0329] R⁴ is alkyl, cycloalkyl or aryl;

[0330] R⁵ is H or alkyl; and

[chemical structure]

[0331] indicates the point of attachment to the remainder of the oligonucleotide;

[0332] c) wherein the monomers are linked by phosphorothioate backbone linkages and/or by phosphodiester backbone linkages; and

[0333] d) wherein at least one nucleobase in the oligonucleotide is a 5-methylcytosine or a 5-methyluracil base.

[0334] The term “the remainder of the oligonucleotide”, as used herein, generally relates to neighbouring monomers. As a skilled person will understand, when a monomer of formula I or of formula II is a terminal monomer, a remainder of the oligonucleotide can be —H. For any monomer of formula I or of formula II, both remainders can be neighbouring monomers. In contrast, for any monomer of formula I or of formula II at most a single remainder can constitute a terminus and thus for example be —H. As is understood by a skilled person, an entire oligonucleotide has only two termini.

[0335] Z—Y is a divalent group. It is preferred that such a divalent group is connected to the 4′-position of the scaffold (near Z) with the bond on the left side of its textual representation, and to the 2′-position of the scaffold (near Y) with the bond on the right side of its textual representation. For example, when the divalent group is said to be —CH₂—O—, it is preferred that —CH₂— is connected to the 4′-position of the scaffold, and that —O— is connected to the 2′-position of the scaffold. This would form an LNA monomer.

[0336] Said oligonucleotide is preferably for use in methods or compositions according to the invention. Said nucleobase under d) may be B or B¹ or another nucleobase.

[0337] In another embodiment, X is F or —OR. In another embodiment, X is F. In another embodiment, X is —OR. In another embodiment, X is F, —OCH₃ or —O—CH₂CH₂OCH₃. In another embodiment, X is —OCH₃ or —O—CH₂CH₂OCH₃. In another embodiment, X is —OCH₃. In another embodiment, X is F or —OCH₃. In another embodiment, X is F or —O—CH₂CH₂OCH₃.

[0338] In another embodiment, R is unsubstituted alkyl. In another embodiment, R is CH₃ or ethyl. In another embodiment, R is CH₃. In another embodiment, R is ethyl. In another embodiment, R is alkyl substituted with halo, OR¹, NR¹R² or SR¹. In another embodiment, R is alkyl substituted with OR¹ or NR¹R². In another embodiment, R is alkyl substituted with OR¹.

[0339] In another embodiment, R¹ is H or unsubstituted alkyl. In another embodiment, R¹ is unsubstituted alkyl. In another embodiment, R¹ is CH₃. In another embodiment, R² is H. In another embodiment, R² is alkyl. In another embodiment, R² is CH₃.

[0340] In another embodiment, Z—Y is a divalent group selected from —(CH₂)ₙO—, —C(CH₂CH₂)O—, —CH₂WCH₂—, —CH₂NR³—, —CH₂S(Oₘ)—, —CH(CH₃)O—, —CH(CH₂OCH₃)O—, —CH₂CH₂—, —C(O)NR³—, —CH═CHO—, —CH₂SO₂NR³— and —NHC(O)NH—. In another embodiment, Z—Y is a divalent group selected from —(CH₂)ₙO—, —CH₂WCH₂—, —CH₂NR³—, —CH(CH₃)O—, —CH(CH₂OCH₃)O—, —CH₂CH₂— and —C(O)NR³—. In another embodiment, Z—Y is selected from —(CH₂)ₙO—, —CH₂NR³—, —CH(CH₃)O—, —CH(CH₂OCH₃)O—, —CH₂CH₂— and —C(O)NR³—. In another embodiment, Z—Y is selected from —(CH₂)ₙO—, —CH₂OCH₂—, —CH₂NR³CH₂—, and —CH₂NR³—. In another embodiment, Z—Y is selected from —(CH₂)ₙO—, —CH₂OCH₂—, —CH₂NHCH₂—, —CH₂NH—, —CH₂N(CH₃)CH₂—, and —CH₂N(CH₃)—. In another embodiment, Z—Y is selected from —CH₂O—, —CH₂OCH₂—, —CH₂NHCH₂—, and —CH₂NH—. In another embodiment, Z—Y is selected from —CH₂O—, —CH₂OCH₂—, or —CH₂NH—. In another embodiment, Z—Y is selected from —(CH₂)ₙO—, —CH(CH₃)O— and —CH(CH₂OCH₃)O—. In another embodiment, Z—Y is —(CH₂)ₙO—. In another embodiment, Z—Y is —CH₂CH₂O—. In another embodiment, Z—Y is —CH₂O—. In another embodiment, Z—Y is —CH₂NH—.

[0341] In another embodiment, W is O, S or NH. In another embodiment, W is O. In another embodiment, W is S. In another embodiment, W is O, NH, or NCH₃. In another embodiment, W is O or NH. In another embodiment, W is NH.

[0342] In another embodiment, R³ is H, —C(O)R⁴ or unsubstituted alkyl. In another embodiment, R³ is H, —C(O)R⁴ or CH₃. In another embodiment, R³ is H, —C(O)CH₃ or CH₃.

[0343] In another embodiment, R⁴ is alkyl. In another embodiment, R⁴ is CH₃.

[0344] In another embodiment, R⁵ is H. In another embodiment, R⁵ is alkyl.

[0345] In another embodiment, X is F, —OCH₃ or —O—CH₂CH₂OCH₃; and Z—Y is —(CH₂)ₙO—CH₂OCH₂—, —CH₂NR³CH₂—, or —CH₂NR³—. In another embodiment, X is F, —OCH₃ or —O—CH₂CH₂OCH₃; and Z—Y is —(CH₂)ₙO—, —CH₂OCH₂—, —CH₂NHCH₂—, or —CH₂NH, —CH₂N(CH₃)CH₂—, or —CH₂N(CH₃)—. In another embodiment, X is F, —OCH₃ or —O—CH₂CH₂OCH₃; and Z—Y is —CH₂O—, —CH₂OCH₂—, —CH₂NHCH₂—, or —CH₂NH—. In another embodiment, X is F, —OCH₃ or —O—CH₂CH₂OCH₃; and Z—Y is selected from —CH₂O—, —CH₂OCH₂—, and —CH₂NH—. In another embodiment, X is F or —OCH₃; and Z—Y is selected from —CH₂O—, —CH₂OCH₂—, and —CH₂NH—. In another embodiment, X is F or OCH₃; and Z—Y is —CH₂O—.

[0346] In another embodiment, at least one B in the oligonucleotide is a 5-methylcytosine or a 5-methyluracil base. In another embodiment, at least one B¹ in the oligonucleotide is a 5-methylcytosine or a 5-methyluracil base. In another embodiment, all of the cytosine nucleobases in the oligonucleotide are 5-methylcytosine. In another embodiment, all of the uracil nucleobases in the oligonucleotide are 5-methyluracil.

[0347] In another embodiment, the oligonucleotides are 10 to 33 nucleotides in length, wherein:

[0348] a) at least one monomer has formula I, wherein

[0349] B is a nucleobase;

[0350] X is F, —NR¹R², or —OR;

[0351] R is optionally substituted alkyl, where the optional substituents, when present, are halo, OR¹, NR¹R², or SR¹;

[0352] R¹ is H, alkyl, cycloalkyl, aryl, heterocycloalkyl, or heteroaryl, each independently optionally further substituted with halo, hydroxy or alkyl;

[0353] R² is H or alkyl; and

[chemical structure]

[0354] indicates the point of attachment to the remainder of the oligonucleotide;

[0355] b) wherein at least one monomer comprises a BNA scaffold modification;

[0356] c) wherein the monomers are linked by phosphorothioate backbone linkages and/or by phosphodiester backbone linkages; and

[0357] d) wherein at least one nucleobase in the oligonucleotide is a 5-methylcytosine or a 5-methyluracil base.

[0358] In another embodiment, the oligonucleotides are 10 to 33 nucleotides in length, wherein:

[0359] a) at least one monomer has formula I, wherein

[0360] B is a nucleobase;

[0361] X is F, —NR¹R², or —OR;

[0362] R is optionally substituted alkyl, where the optional substituents, when present, are halo, OR¹, NR¹R², or SR¹;

[0363] R¹ is H, alkyl, cycloalkyl, aryl, heterocycloalkyl, or heteroaryl, each independently optionally further substituted with halo, hydroxy or alkyl;

[0364] R² is H or alkyl; and

[chemical structure]

[0365] indicates the point of attachment to the remainder of the oligonucleotide;

[0366] b) wherein at least one monomer comprises a BNA scaffold modification and has formula II, wherein B¹ and Z—Y are as defined above;

[0367] c) wherein the monomers are linked by phosphorothioate backbone linkages and/or by phosphodiester backbone linkages; and

[0368] d) wherein at least one nucleobase in the oligonucleotide is a 5-methylcytosine or a 5-methyluracil base.

[0369] In another embodiment, the BNA scaffold modification results in a monomer that is CRN, LNA, Xylo-LNA, α-LNA, α-L-LNA, β-D-LNA, 2′-amino-LNA, 2′-(alkylamino)-LNA, 2′-(acylamino)-LNA, 2′-thio-LNA, cEt BNA, cMOE BNA, cLNA, amido-bridged LNA; 2′,4′-BNA^{NC}(N—H); 2′,4′-BNA^{NC}(N-Me); 2′,4′-BNA^{NC}(N-Bn), CBBN, ENA, DpNA, sulfonamide-bridged BNA, urea-bridged BNA, bicyclic carbocyclic nucleotide, TriNA, α-L-TriNA, bcDNA, tcDNA, F-bcDNA, F-tcDNA, heterocyclic-bridged BNA, locked PMO derived from 2′-amino-LNA, GuNA, or scpNA.

[0370] In another embodiment, the BNA scaffold modification results in a monomer that is CRN, LNA, Xylo-LNA, α-LNA, α-L-LNA, β-D-LNA, 2′-amino-LNA, 2′-(alkylamino)-LNA, 2′-(acylamino)-LNA, 2′-thio-LNA, cEt BNA, cMOE BNA, cLNA, amido-bridged LNA; 2′,4′-BNA^{NC}(N—H); 2′,4′-BNA^{NC}(N-Me); 2′,4′-BNA^{NC}(N-Bn), CBBN, ENA, DpNA, sulfonamide-bridged BNA, urea-bridged BNA. In another embodiment, the BNA scaffold modification results in a monomer that is CRN, LNA, Xylo-LNA, α-LNA, α-L-LNA, β-D-LNA, 2′-amino-LNA, or 2′-(alkylamino)-LNA. In another embodiment, the BNA scaffold modification results in a monomer that is CRN, LNA, 2′-amino-LNA, or CBBN. In another embodiment, the BNA scaffold modification results in a monomer that is CRN, LNA, or 2′-amino-LNA. In another embodiment, the BNA scaffold modification results in a monomer that is LNA, Xylo-LNA, α-LNA, α-L-LNA, β-D-LNA, 2′-amino-LNA, 2′-(alkylamino)-LNA, 2′-(acylamino)-LNA, 2′-thio-LNA, cEt BNA, cMOE BNA, or cLNA. In another embodiment, the BNA scaffold modification results in a monomer that is LNA, 2′-amino-LNA, 2′-(alkylamino)-LNA, 2′-thio-LNA, cEt BNA, cMOE BNA, or cLNA. In another embodiment, the BNA scaffold modification results in a monomer that is LNA, 2′-amino-LNA, 2′-(alkylamino)-LNA, 2′,4′-BNA^{NC}(N—H); 2′,4′-BNA^{NC}(N-Me), CBBN, or ENA. In another embodiment, the BNA scaffold modification results in a monomer that is LNA, 2′-amino-LNA, 2′,4′-BNA^{NC}(N—H), CBBN, or ENA. In another embodiment, the BNA scaffold modification results in a monomer that is LNA, CBBN, or ENA. In another embodiment, the BNA scaffold modification results in a monomer that is LNA or ENA. In another embodiment, the BNA scaffold modification results in a monomer that is LNA.

[0371] In another embodiment, the BNA scaffold modification results in a monomer that is 2′,4′-BNA^{NC}(N—H); 2′,4′-BNA^{NC}(N-Me); 2′,4′-BNA^{NC}(N-Bn), CBBN, ENA, sulfonamide-bridged BNA, or urea-bridged BNA. In another embodiment, the BNA scaffold modification results in a monomer that is 2′,4′-BNA^{NC}(N—H); 2′,4′-BNA^{NC}(N-Me), CBBN, or ENA.

[0372] In another embodiment, the oligonucleotides are 10 to 33 nucleotides in length, wherein:

[0373] a) at least one monomer has formula I, wherein:

[0374] B is a nucleobase;

[0375] X is F, —OCH₃, or —O—CH₂CH₂OCH₃; and

[chemical structure]

[0376] indicates the point of attachment to the remainder of the oligonucleotide;

[0377] b) wherein at least one monomer comprises a BNA scaffold modification and has formula II, wherein

[0378] B¹ is a nucleobase;

[0379] Z—Y is a divalent group selected from —(CH₂)ₙO—, —C(CH₂CH₂)O—, —CH₂WCH₂—, —CH₂NR³—, —CH₂S—, —CH(CH₃)O—, —CH(CH₂OCH₃)O—, —CH₂CH₂—, —C(O)NR³—, —CH═CHO—, —CH₂SO₂NR³—, and —NHC(O)NH—;

[0380] n is 1 or 2;

[0381] W is O, S, or NR³;

[0382] R³ is H, —C(O)R⁴, —C(═NH)NR⁵R⁵, benzyl, or optionally substituted alkyl, where the optional substituents, when present, are selected from halo and alkoxy;

[0383] R⁴ is alkyl, cycloalkyl, or aryl;

[0384] R⁵ is H or alkyl; and

[chemical structure]

[0385] indicates the point of attachment to the remainder of the oligonucleotide;

[0386] c) wherein the monomers are linked by phosphorothioate backbone linkages and/or by phosphodiester backbone linkages; and

[0387] d) wherein at least one nucleobase in the oligonucleotide is a 5-methylcytosine or a 5-methyluracil base.

[0388] In another embodiment, the oligonucleotides are 10 to 33 nucleotides in length, wherein:

[0389] a) at least one monomer has formula I wherein:

[0390] B is a nucleobase;

[0391] X is F, —OCH₃, or —O—CH₂CH₂OCH₃; and

[chemical structure]

[0392] indicates the point of attachment to the remainder of the oligonucleotide;

[0393] b) wherein one or two monomers comprise a BNA scaffold modification and have formula II, wherein:

[0394] B¹ is a nucleobase;

[0395] Z—Y is a divalent group selected from —(CH₂)ₙO—, —C(CH₂CH₂)O—, —CH₂WCH₂—, —CH₂NR³—, —CH₂S—, —CH(CH₃)O—, —CH(CH₂OCH₃)O—, —CH₂CH₂—, —C(O)NR³—, —CH═CHO—, —CH₂SO₂NR³—, and —NHC(O)NH—;

[0396] n is 1 or 2;

[0397] W is O, S, or NR³;

[0398] R³ is H, —C(O)R⁴, —C(═NH)NR⁵R⁵, benzyl, or optionally substituted alkyl, where the optional substituents, when present, are selected from halo and alkoxy;

[0399] R⁴ is alkyl, cycloalkyl, or aryl;

[0400] R⁵ is H or alkyl; and

[chemical structure]

[0401] indicates the point of attachment to the remainder of the oligonucleotide;

[0402] c) wherein the monomers are linked by phosphorothioate backbone linkages and/or by phosphodiester backbone linkages; and

[0403] d) wherein at least one nucleobase in the oligonucleotide is a 5-methylcytosine or a 5-methyluracil base.

[0404] In another embodiment, the oligonucleotides are 10 to 33 nucleotides in length, wherein all the monomers that do not comprise a BNA scaffold modification (“the non-BNA monomers”) are modified monomers of formula I. In another embodiment, the oligonucleotides are 10 to 33 nucleotides in length, with one or two non-BNA monomers of formula I. In another embodiment, the oligonucleotides are 10 to 33 nucleotides in length, with one non-BNA monomer of formula I.

[0405] In another embodiment, the oligonucleotide comprises 1, 2, 3, 4, 5, 6, or 7 monomers comprising a BNA scaffold modification. In another embodiment, the oligonucleotide comprises 1, 2, 3, 4, 5, 6, or 7 monomers comprising a BNA scaffold modification and having formula II. In another embodiment, the oligonucleotide comprises 1, 2, 3, or 4 monomers comprising a BNA scaffold modification. In another embodiment, the oligonucleotide comprises 1, 2, 3, or 4 monomers comprising a BNA scaffold modification and having formula II. In another embodiment, the oligonucleotide comprises 1, 2, or 3 monomers comprising a BNA scaffold modification. In another embodiment, the oligonucleotide comprises 1, 2, or 3 monomers comprising a BNA scaffold modification and having formula II. In another embodiment, the oligonucleotide comprises 1 or 2 monomers comprising a BNA scaffold modification. In another embodiment, the oligonucleotide comprises 1 or 2 monomers comprising a BNA scaffold modification and having formula II. In another embodiment, the oligonucleotide comprises two monomers comprising a BNA scaffold modification. In another embodiment, the oligonucleotide comprises two monomers comprising a BNA scaffold modification and having formula II. In another embodiment, the oligonucleotide comprises one monomer comprising a BNA scaffold modification. In another embodiment, the oligonucleotide comprises one monomer comprising a BNA scaffold modification and having formula II.

[0406] In another embodiment, the oligonucleotide according to the invention comprises the sequence GGAAGAUGGCAU (SEQ ID NO: 6072). In another embodiment, the oligonucleotide according to the invention comprises a sequence selected from the group consisting of SEQ ID NOs: 453, 455, 456, 453, 455, 456, 459, 461, 462, 465, 467, 468, 471, 473, 474, 483, 486, 525, 531, 538, 539, 540, 543, 545, 546, and 4528-4572. In another embodiment, the oligonucleotide according to the invention comprises a sequence selected from the group consisting of SEQ ID NOs: 453, 455, 459, 4528, 4531, 4532, 4533, 4535, 4542, 4548, and 4568. In another embodiment, the oligonucleotide according to the invention comprises a sequence selected from the group consisting of SEQ ID NOs: 453, 455, and 456. In another embodiment, the oligonucleotide according to the invention comprises a sequence selected from the group consisting of SEQ ID NOs: 455 and 459. In another embodiment, the oligonucleotide according to the invention comprises a sequence selected from the group consisting of SEQ ID NOs: 4528, 4531, 4532, 4533, 4535, 4542, 4548, and 4568. In another embodiment, the oligonucleotide according to the invention comprises a sequence selected from the group consisting of SEQ ID NOs: 459, 4528, 4531, 4532, 4533, and 4542.

[0407] In another embodiment, the oligonucleotide according to the invention comprises the sequence GGAAGAUGGCAU (SEQ ID NO: 6072) and is for skipping exon 51 of pre-mRNA of dystrophin. In another embodiment, the oligonucleotide according to the invention comprises a sequence selected from the group consisting of SEQ ID NOs: 452-613 or SEQ ID NOs: 4528-4572 and is for skipping exon 51 of pre-mRNA of dystrophin. In another embodiment, the oligonucleotide according to the invention comprises a sequence selected from the group consisting of SEQ ID NOs: 453, 455, and 456 and is for skipping exon 51 of pre-mRNA of dystrophin. In another embodiment, the oligonucleotide according to the invention comprises a sequence selected from the group consisting of SEQ ID NOs: 455 and 459 and is for skipping exon 51 of pre-mRNA of dystrophin.

[0408] In another embodiment, the oligonucleotide according to the invention comprises the sequence GGUAAGUUCNGUCCAAGC (SEQ ID NO: 6073), wherein N is T or U. In another embodiment, the oligonucleotide according to the invention comprises the sequence GGUAAGUUCNGUCCAAGC (SEQ ID NO: 6073), wherein N is T or U, and is for skipping exon 51 of pre-mRNA of dystrophin. In another embodiment, the oligonucleotide according to the invention comprises a sequence selected from the group consisting of SEQ ID NOs: 4565-4571. In another embodiment, the oligonucleotide according to the invention comprises a sequence selected from the group consisting of SEQ ID NOs: 4565-4571 and is for skipping exon 51 of pre-mRNA of dystrophin.

[0409] In another embodiment, the oligonucleotide according to the invention comprises a sequence selected from the group consisting of SEQ ID NOs: 4561-4564 and SEQ ID NO:4572. In another embodiment, the oligonucleotide according to the invention comprises a sequence selected from the group consisting of SEQ ID NOs: 4561-4564 and SEQ ID NO:4572 and is for skipping exon 51 of pre-mRNA of dystrophin.

[0410] In another embodiment, the oligonucleotide according to the invention comprises the sequence CCCAAUUUUUCCUG (SEQ ID NO: 6074). In another embodiment, the oligonucleotide according to the invention comprises the sequence CCCAAUGCCAUCCUG (SEQ ID NO: 6075). In another embodiment, the oligonucleotide according to the invention comprises a sequence selected from the group consisting of SEQ ID NOs: 3185, 3573, 3855, 4198, and 4401. In another embodiment, the oligonucleotide according to the invention comprises a sequence selected from the group consisting of SEQ ID NOs: 3185, 3573, 3855, and 4401. In another embodiment, the oligonucleotide according to the invention comprises the sequence CCCAAUUUUUCCUG (SEQ ID NO: 6074) and is for skipping exon 45 of pre-mRNA of dystrophin. In another embodiment, the oligonucleotide according to the invention comprises the sequence CCCAAUGCCAUCCUG (SEQ ID NO: 6075) and is for skipping exon 45 of pre-mRNA of dystrophin. In another embodiment, the oligonucleotide according to the invention comprises a sequence selected from the group consisting of SEQ ID NOs: 3185, 3573, 3855, 4198, and 4401 and is for skipping exon 45 of pre-mRNA of dystrophin. In another embodiment, the oligonucleotide according to the invention comprises a sequence selected from the group consisting of SEQ ID NOs: 3185, 3573, 3855, and 4401 and is for skipping exon 45 of pre-mRNA of dystrophin.

[0411] In preferred embodiments, the oligonucleotide according to the invention comprises the sequence CUUCUGUUAGCC (SEQ ID NO: 6076). Such an oligonucleotide preferably has a length of 16 to 24 nucleotides, more preferably of 20 nucleotides. In this context, a preferred embodiment is the antisense oligonucleotide consisting of the nucleotide sequence represented by SEQ ID NO: 29.

[0412] In preferred embodiments, the oligonucleotide according to the invention comprises the sequence UAUUUAGCA (SEQ ID NO: 6077). Such an oligonucleotide preferably has a length of 16 to 24 nucleotides, more preferably of 23 nucleotides. In this context, a preferred embodiment is the antisense oligonucleotide consisting of the nucleotide sequence represented by SEQ ID NO: 161.

[0413] In preferred embodiments, the oligonucleotide according to the invention comprises the sequence GGAAUUUGU (SEQ ID NO: 6078). Such an oligonucleotide preferably has a length of 16 to 24 nucleotides, more preferably of 23 nucleotides. In this context, a preferred embodiment is the antisense oligonucleotide consisting of the nucleotide sequence represented by SEQ ID NO: 119.

[0414] In preferred embodiments, the oligonucleotide according to the invention comprises the sequence CUCAACAGA (SEQ ID NO: 6079). Such an oligonucleotide preferably has a length of 16 to 24 nucleotides, more preferably of 23 nucleotides. In this context, a preferred embodiment is the antisense oligonucleotide consisting of the nucleotide sequence represented by SEQ ID NO: 233.

[0415] When an oligonucleotide according to the invention is for skipping exon 44 of pre-mRNA of dystrophin, it is preferred that it comprises a sequence represented by SEQ ID NOs: 6076-6079.

[0416] In preferred embodiments, the oligonucleotide according to the invention comprises the sequence GCCCAAU (SEQ ID NO: 6080). Such an oligonucleotide preferably has a length of 16 to 26 nucleotides, more preferably of 25 nucleotides. In this context, a preferred embodiment is the antisense oligonucleotide consisting of the nucleotide sequence represented by SEQ ID NO: 3185.

[0417] In preferred embodiments, the oligonucleotide according to the invention comprises the sequence CCAAUUUU (SEQ ID NO: 6081). Such an oligonucleotide preferably has a length of 16 to 26 nucleotides, more preferably of 24 nucleotides. In this context, a preferred embodiment is the antisense oligonucleotide consisting of the nucleotide sequence represented by SEQ ID NO: 3573.

[0418] In preferred embodiments, the oligonucleotide according to the invention comprises the sequence GCCCAAU (SEQ ID NO: 6082). Such an oligonucleotide preferably has a length of 16 to 26 nucleotides, more preferably of 25 nucleotides. In this context, a preferred embodiment is the antisense oligonucleotide consisting of the nucleotide sequence represented by SEQ ID NO: 3855.

[0419] In preferred embodiments, the oligonucleotide according to the invention comprises the sequence UCUGACAACA (SEQ ID NO: 6083). Such an oligonucleotide preferably has a length of 16 to 24 nucleotides, more preferably of 22 nucleotides. In this context, a preferred embodiment is the antisense oligonucleotide consisting of the nucleotide sequence represented by SEQ ID NO: 4198.

[0420] In preferred embodiments, the oligonucleotide according to the invention comprises the sequence CAAUGCCAUCC (SEQ ID NO: 6084). Such an oligonucleotide preferably has a length of 16 to 24 nucleotides, more preferably of 21 nucleotides. In this context, a preferred embodiment is the antisense oligonucleotide consisting of the nucleotide sequence represented by SEQ ID NO: 4401.

[0421] When an oligonucleotide according to the invention is for skipping exon 45 of pre-mRNA of dystrophin, it is preferred that it comprises a sequence represented by SEQ ID NOs: 6074, 6075, or 6080-6084.

[0422] In preferred embodiments, the oligonucleotide according to the invention comprises the sequence AAGAUGGCAU (SEQ ID NO: 6085). Such an oligonucleotide preferably has a length of 16 to 24 nucleotides, more preferably of 22 nucleotides. In this context, a preferred embodiment is the antisense oligonucleotide consisting of the nucleotide sequence represented by SEQ ID NO: 459.

[0423] In preferred embodiments, the oligonucleotide according to the invention comprises the sequence UAAGUUCUGUCCAA (SEQ ID NO: 6086). Such an oligonucleotide preferably has a length of 16 to 24 nucleotides, more preferably of 18 nucleotides. In this context, a preferred embodiment is the antisense oligonucleotide consisting of the nucleotide sequence represented by SEQ ID NO: 4565.

[0424] When an oligonucleotide according to the invention is for skipping exon 51 of pre-mRNA of dystrophin, it is preferred that it comprises a sequence represented by SEQ ID NOs: 6072, 6073, 6085 or 6086.

[0425] In preferred embodiments, the oligonucleotide according to the invention comprises the sequence GUUGCCUCCGGUUC (SEQ ID NO: 6087). Such an oligonucleotide preferably has a length of 16 to 24 nucleotides, more preferably of 18 nucleotides. In this context, a preferred embodiment is the antisense oligonucleotide consisting of the nucleotide sequence represented by SEQ ID NO: 845.

[0426] In preferred embodiments, the oligonucleotide according to the invention comprises the sequence GGUUCUG (SEQ ID NO: 6088). Such an oligonucleotide preferably has a length of 16 to 26 nucleotides, more preferably of 25 nucleotides. In this context, a preferred embodiment is the antisense oligonucleotide consisting of the nucleotide sequence represented by SEQ ID NO: 863.

[0427] In preferred embodiments, the oligonucleotide according to the invention comprises the sequence GAUUCUGAAU (SEQ ID NO: 6089). Such an oligonucleotide preferably has a length of 16 to 24 nucleotides, more preferably of 22 nucleotides. In this context, a preferred embodiment is the antisense oligonucleotide consisting of the nucleotide sequence represented by SEQ ID NO: 4987.

[0428] In preferred embodiments, the oligonucleotide according to the invention comprises the sequence ACUUCAUC (SEQ ID NO: 6090). Such an oligonucleotide preferably has a length of 16 to 26 nucleotides, more preferably of 24 nucleotides. In this context, a preferred embodiment is the antisense oligonucleotide consisting of the nucleotide sequence represented by SEQ ID NO: 5174.

[0429] In preferred embodiments, the oligonucleotide according to the invention comprises the sequence UUCCAUGA (SEQ ID NO: 6091). Such an oligonucleotide preferably has a length of 16 to 26 nucleotides, more preferably of 24 nucleotides. In this context, a preferred embodiment is the antisense oligonucleotide consisting of the nucleotide sequence represented by SEQ ID NO: 5446.

[0430] In preferred embodiments, the oligonucleotide according to the invention comprises the sequence UGUUGCCU (SEQ ID NO: 6092). Such an oligonucleotide preferably has a length of 16 to 26 nucleotides, more preferably of 24 nucleotides. In this context, a preferred embodiment is the antisense oligonucleotide consisting of the nucleotide sequence represented by SEQ ID NO: 5765.

[0431] When an oligonucleotide according to the invention is for skipping exon 53 of pre-mRNA of dystrophin, it is preferred that it comprises a sequence represented by SEQ ID NOs: 6087-6092.

### Composition

[0432] In an aspect of the invention is provided a composition comprising at least one oligonucleotide according to the invention, preferably wherein said composition comprises at least one excipient, and/or wherein said oligonucleotide comprises at least one conjugated ligand, that may further aid in enhancing the targeting and/or delivery of said composition and/or said oligonucleotide to a tissue and/or cell and/or into a tissue and/or cell. Compositions as described here are herein referred to as compositions according to the invention. A composition according to the invention can comprise one or more than one oligonucleotide according to the invention. In the context of this invention, an excipient can be a distinct molecule, but it can also be a conjugated moiety. In the first case, an excipient can be a filler, such as starch. In the latter case, an excipient can for example be a targeting ligand that is linked to the oligonucleotide according to the invention.

[0433] In preferred embodiments of this aspect, such compositions can further comprise a cationic amphiphilic compound (CAC) or a cationic amphiphilic drug (CAD). A CAC is generally a lysosomotropic agent and a weak base that can buffer endosomes and lysosomes (Mae et al., Journal of Controlled Release 134:221-227, 2009). Compositions that further comprise a CAC preferably have an improved parameter for RNA modulation as compared to a similar composition that does not comprise said CAC. Without being bound to theory, it is thought that this is because a CAC can aid an oligonucleotide of the invention in reaching its site of activity, for example through facilitating endosomal escape. A preferred CAC as comprised in compositions of the invention is toremifene and its derivatives, analogues, and metabolites, such as N-desmethyl toremifene, tamoxifen, afimoxifene, clomiphene, droloxifene, idoxifene, miproxifene, and nafoxidine. These CACs share a common 1,1-diphenylethylene moiety. When a compound differs from a compound as described here only through minor substitutions or modifications, said compound is a derivative of such a compound, and can also be seen as an analogue thereof. Metabolites of a compound are a special class of derivatives. For compounds that are known in the art, metabolites are often also known. At least all of these known metabolites are referred to when a metabolite of a compound is referenced. For example, N-desmethyl toremifene is a known metabolite of toremifene.

[0434] In a preferred embodiment, said composition is for use as a medicament. Said composition is therefore a pharmaceutical composition. A pharmaceutical composition usually comprises a pharmaceutically accepted carrier, diluent and/or excipient. In a preferred embodiment, a composition of the current invention comprises a compound as defined herein and optionally further comprises a pharmaceutically acceptable formulation, filler, preservative, solubilizer, carrier, diluent, excipient, salt, adjuvant and/or solvent. Such pharmaceutically acceptable carrier, filler, preservative, solubilizer, diluent, salt, adjuvant, solvent and/or excipient may for instance be found in Remington: The Science and Practice of Pharmacy, 20th Edition. Baltimore, Md.: Lippincott Williams & Wilkins, 2000. The compound as described in the invention may possess at least one ionizable group. An ionizable group may be a base or acid, and may be charged or neutral. An ionizable group may be present as ion pair with an appropriate counterion that carries opposite charge(s). Examples of cationic counterions are sodium, potassium, cesium, Tris, lithium, calcium, magnesium, trialkylammonium, triethylammonium, and tetraalkylammonium. Examples of anionic counterions are chloride, bromide, iodide, lactate, mesylate, besylate, triflate, acetate, trifluoroacetate, dichloroacetate, tartrate, lactate, and citrate. Examples of counterions have been described [e.g. Kumar, 2008] which is incorporated here in its entirety by reference].

[0435] A pharmaceutical composition may comprise an aid in enhancing the stability, solubility, absorption, bioavailability, activity, pharmacokinetics, pharmacodynamics, cellular uptake, and intracellular trafficking of said compound, in particular an excipient capable of forming complexes, nanoparticles, microparticles, nanotubes, nanogels, hydrogels, poloxamers or pluronics, polymersomes, colloids, microbubbles, vesicles, micelles, lipoplexes, and/or liposomes. Examples of nanoparticles include polymeric nanoparticles, (mixed) metal nanoparticles, carbon nanoparticles, gold nanoparticles, magnetic nanoparticles, silica nanoparticles, lipid nanoparticles, sugar particles, protein nanoparticles and peptide nanoparticles. An example of the combination of nanoparticles and oligonucleotides is spherical nucleic acid (SNA), as in e.g. Barnaby et al. Cancer Treat. Res. 2015, 166, 23.

[0436] A preferred composition comprises at least one excipient that may further aid in enhancing the targeting and/or delivery of said composition and/or said oligonucleotide to a tissue and/or a cell and/or into a tissue and/or a cell. A preferred tissue or cell is a muscle tissue or cell.

[0437] Many of these excipients are known in the art (e.g. see Bruno, 2011) and may be categorized as a first type of excipient. Examples of first type of excipients include polymers (e.g. polyethyleneimine (PEI), polypropyleneimine (PPI), dextran derivatives, butylcyanoacrylate (PBCA), hexylcyanoacrylate (PHCA), poly(lactic-co-glycolic acid) (PLGA), polyamines (e.g. spermine, spermidine, putrescine, cadaverine), chitosan, poly(amido amines) (PAMAM), poly(ester amine), polyvinyl ether, polyvinyl pyrrolidone (PVP), polyethylene glycol (PEG) cyclodextrins, hyaluronic acid, colominic acid, and derivatives thereof), dendrimers (e.g. poly(amidoamine)), lipids {e.g. 1,2-dioleoyl-3-dimethylammonium propane (DODAP), dioleoyldimethylammonium chloride (DODAC), phosphatidylcholine derivatives [e.g. 1,2-distearoyl-sn-glycero-3-phosphocholine (DSPC)], lyso-phosphatidylcholine derivatives [e.g. 1-stearoyl-2-lyso-sn-glycero-3-phosphocholine (S-LysoPC)], sphingomyeline, 2-{3-[Bis-(3-amino-propyl)-amino]-propylamino}-N-ditetracedyl carbamoyl methylacetamide (RPR209120), phosphoglycerol derivatives [e.g. 1,2-dipalmitoyl-sn-glycero-3-phosphoglycerol, sodium salt (DPPG-Na), phosphaticid acid derivatives [1,2-distearoyl-sn-glycero-3-phosphaticid acid, sodium salt (DSPA), phosphatidylethanolamine derivatives [e.g. dioleoyl-L-R-phosphatidylethanolamine (DOPE), 1,2-distearoyl-sn-glycero-3-phosphoethanolamine (DSPE), 2-diphytanoyl-sn-glycero-3-phosphoethanolamine (DPhyPE),], N-[1-(2,3-dioleoyloxy)propyl]-N,N,N-trimethylammonium (DOTAP), N-[1-(2,3-dioleyloxy)propyl]-N,N,N-trimethylammonium (DOTMA), 1,3-di-oleoyloxy-2-(6-carboxy-spermyl)-propylamid (DOSPER), (1,2-dimyristyolxypropyl-3-dimethylhydroxy ethyl ammonium (DMRIE), (N1-cholesteryloxycarbonyl-3,7-diazanonane-1,9-diamine (CDAN), dimethyldioctadecylammonium bromide (DDAB), 1-palmitoyl-2-oleoyl-sn-glycerol-3-phosphocholine (POPC), (b-L-Arginyl-2,3-L-diaminopropionic acid-N-palmityl-N-olelyl-amide trihydrochloride (AtuFECT01), N,N-dimethyl-3-aminopropane derivatives [e.g. 1,2-distearoyloxy-N, N-dimethyl-3-aminopropane (DSDMA), 1,2-dioleyloxy-N,N-dimethyl-3-aminopropane (DoDMA), 1,2-Dilinoleyloxy-N,N-3-dimethylaminopropane (DLinDMA), 2,2-dilinoleyl-4-dimethylaminomethyl [1,3]-dioxolane (DLin-K-DMA), phosphatidylserine derivatives [1,2-dioleyl-sn-glycero-3-phospho-L-serine, sodium salt (DOPS)], proteins (e.g. albumin, gelatins, atellocollagen), and linear or cyclic peptides (e.g. protamine, PepFects, NickFects, polyarginine, polylysine, CADY, MPG, cell-penetrating peptides (CPPs), targeting peptides, cell-translocating peptides, endosomal escape peptides). Examples of such peptides have been described, e.g. muscle targeting peptides (e.g. Jirka et al., Nucl. Acid Ther. 2014, 24, 25), CPPs (e.g. Pip series, including WO2013/030569, and oligoarginine series, e.g. U.S. Pat. No. 9,161,948 (Sarepta), WO2016/187425 (Sarepta), and M12 peptide in e.g. Gao et al., Mol. Ther. 2014, 22, 1333), or blood-brain barrier (BBB) crossing peptides such as (branched) ApoE derivatives (Shabanpoor et al., Nucl. Acids Ther. 2017, 27, 130). Carbohydrates and carbohydrate clusters as described below, when used as distinct compounds, are also suitable for use as a first type of excipient.

[0438] Another preferred composition may comprise at least one excipient categorized as a second type of excipient. A second type of excipient may comprise or contain a conjugate group as described herein to enhance targeting and/or delivery of the composition and/or of the oligonucleotide of the invention to a tissue and/or cell and/or into a tissue and/or cell, as for example muscle tissue or cell. The conjugate group may display one or more different or identical ligands. Examples of conjugate group ligands are e.g. peptides, vitamins, aptamers, carbohydrates or mixtures of carbohydrates (Han et al., Nature Communications, 2016, doi:10.1038/ncomms10981; Cao et al., Mol. Ther. Nucleic Acids, 2016, doi:10.1038/mtna.2016.46), proteins, small molecules, antibodies, polymers, drugs. Examples of carbohydrate conjugate group ligands are glucose, mannose, galactose, maltose, fructose, N-acetylgalactosamine (GalNac), glucosamine, N-acetylglucosamine, glucose-6-phosphate, mannose-6-phosphate, and maltotriose. Carbohydrates may be present in plurality, for example as end groups on dendritic or branched linker moieties that link the carbohydrates to the component of the composition. A carbohydrate can also be comprised in a carbohydrate cluster portion, such as a GalNAc cluster portion. A carbohydrate cluster portion can comprise a targeting moiety and, optionally, a conjugate linker. In some embodiments, the carbohydrate cluster portion comprises 1, 2, 3, 4, 5, 6, or more GalNAc groups. As used herein, “carbohydrate cluster” means a compound having one or more carbohydrate residues attached to a scaffold or linker group, (see, e.g., Maier et al., “Synthesis of Antisense Oligonucleotides Conjugated to a Multivalent Carbohydrate Cluster for Cellular Targeting,” Bioconjugate Chem., 2003, (14): 18-29; Rensen et al., “Design and Synthesis of Novel N-Acetylgalactosamine-Terminated Glycolipids for Targeting of Lipoproteins to the Hepatic Asiaglycoprotein Receptor,” J. Med. Chem. 2004, (47): 5798-5808). In this context, “modified carbohydrate” means any carbohydrate having one or more chemical modifications relative to naturally occurring carbohydrates. As used herein, “carbohydrate derivative” means any compound which may be synthesized using a carbohydrate as a starting material or intermediate. As used herein, “carbohydrate” means a naturally occurring carbohydrate, a modified carbohydrate, or a carbohydrate derivative. Both types of excipients may be combined together into one single composition as identified herein. An example of a trivalent N-acetylglucosamine cluster is described in WO2017/062862 (Wave Life Sciences), which also describes a cluster of sulfonamide small molecules. An example of a single conjugate of the small molecule sertraline has also been described (Ferr6s-Coy et al., Mol. Psych. 2016, 21, 328), as well as conjugates of protein-binding small molecules, including ibuprofen (e.g. U.S. Pat. No. 6,656,730 ISIS/Ionis Pharmaceuticals), spermine (e.g. Noir et al., J. Am. Chem Soc. 2008, 130, 13500), anisamide (e.g. Nakagawa et al., J. Am. Chem. Soc. 2010, 132, 8848) and folate (e.g. Dohmen et al., Mol. Ther. Nucl. Acids 2012, 1, e7).

[0439] Conjugates of oligonucleotides with aptamers are known in the art (e.g. Zhao et al. Biomaterials 2015, 67, 42).

[0440] Antibodies and antibody fragments can also be conjugated to an oligonucleotide of the invention. In a preferred embodiment, an antibody or fragment thereof targeting tissues of specific interest, particularly muscle tissue, is conjugated to an oligonucleotide of the invention. Examples of such antibodies and/or fragments are e.g. targeted against CD71 (transferrin receptor), described in e.g. WO2016/179257 (CytoMx) and in Sugo et al. J. Control. Rel. 2016, 237, 1, or against equilibrative nucleoside transporter (ENT), such as the 3E10 antibody, as described in e.g. Weisbart et al., Mol. Cancer Ther. 2012, 11, 1.

[0441] Other oligonucleotide conjugates are known to those skilled in the art, and have been reviewed in e.g. Winkler et al., Ther. Deliv. 2013, 4, 791, Manoharan, Antisense Nucl. Acid. Dev. 2004, 12, 103 and Ming et al., Adv. Drug Deliv. Rev. 2015, 87, 81.

[0442] The skilled person may select, combine and/or adapt one or more of the above or other alternative excipients and delivery systems to formulate and deliver a compound for use in the present invention.

[0443] Such a pharmaceutical composition of the invention may be administered in an effective concentration at set times to an animal, preferably a mammal. More preferred mammal is a human being. An oligonucleotide or a composition as defined herein for use according to the invention may be suitable for direct administration to a cell, tissue and/or an organ in vivo of individuals affected by or at risk of developing a disease or condition as identified herein, and may be administered directly in vivo, ex vivo or in vitro. Administration may be via topical, systemic and/or parenteral routes, for example intravenous, subcutaneous, intraperitoneal, intrathecal, intramuscular, ocular, nasal, urogenital, intradermal, dermal, enteral, intravitreal, intracavernous, intracerebral, intrathecal, epidural or oral route.

[0444] Preferably, such a pharmaceutical composition of the invention may be encapsulated in the form of an emulsion, suspension, pill, tablet, capsule or soft-gel for oral delivery, or in the form of aerosol or dry powder for delivery to the respiratory tract and lungs.

[0445] In an embodiment an oligonucleotide of the invention may be used together with another compound already known to be used for the treatment of said disease. Such other compounds may be used for reducing inflammation, preferably for reducing muscle tissue inflammation, and/or an adjunct compound for improving muscle fiber function, integrity and/or survival and/or improve, increase or restore cardiac function.

[0446] Examples are, but not limited to, a steroid, preferably a (gluco)corticosteroid, epicatechin, an ACE inhibitor (preferably perindopril), and HDAC inhibitor, an angiotensin II type 1 receptor blocker (preferably losartan), angiotensin peptide (1-7), a tumor necrosis factor-alpha (TNFα) inhibitor, an NF-kB inhibitor, a TGFβ inhibitor (preferably decorin), human recombinant biglycan, a source of mlGF-1, a myostatin inhibitor, mannose-6-phosphate, an antioxidant, an ion channel inhibitor, dantrolene, a protease inhibitor, a phosphodiesterase inhibitor (preferably a PDE5 inhibitor, such as sildenafil or tadalafil), and/or L-arginine. Such combined use may be a sequential use: each component is administered in a distinct fashion, perhaps as a distinct composition. Alternatively each compound may be used together in a single composition.

[0447] Compounds that are comprised in a composition according to the invention can also be provided separately, for example to allow sequential administration of the active components of the composition according to the invention. In such a case, the composition according to the invention is a combination of compounds comprising at least an oligonucleotide according to the invention with or without a conjugated ligand, at least one excipient, and optionally a CAC as described above.

### Use

[0448] In a further aspect, there is provided the use of a composition or an oligonucleotide as described in the previous sections for use as a medicament or part of therapy, or applications in which said oligonucleotide exerts its activity intracellularly.

[0449] Preferably, an oligonucleotide or composition of the invention is for use as a medicament or part of a therapy for preventing, delaying, curing, ameliorating and/or treating DMD or BMD or SMA.

[0450] In an embodiment of this aspect of the invention is provided the oligonucleotide according to the invention, or the composition according to the invention, for use as a medicament, preferably for treating, preventing, and/or delaying Duchenne Muscular Dystrophy (DMD), Becker Muscular Dystrophy (BMD), or Spinal Muscular Atrophy (SMA).

### Method

[0451] In a further aspect, there is provided a method for preventing, treating, curing, ameliorating and/or delaying a condition or disease as defined in the previous section in an individual, in a cell, tissue or organ of said individual. The method comprises administering an oligonucleotide or a composition of the invention to said individual or a subject in the need thereof.

[0452] The method according to the invention wherein an oligonucleotide or a composition as defined herein may be suitable for administration to a cell, tissue and/or an organ in vivo of individuals affected by any of the herein defined diseases or at risk of developing an inflammatory disorder, and may be administered in vivo, ex vivo or in vitro. An individual or a subject in need is preferably a mammal, more preferably a human being. Alternately, a subject is not a human. Administration may be via topical, systemic and/or parenteral routes, for example intravenous, subcutaneous, nasal, ocular, intraperitoneal, intrathecal, intramuscular, intracavernous, urogenital, intradermal, dermal, enteral, intravitreal, intracerebral, intrathecal, epidural or oral route.

[0453] In an embodiment, in a method of the invention, a concentration of an oligonucleotide or composition is ranged from 0.01 nM to 1 μM. More preferably, the concentration used is from 0.05 to 500 nM, or from 0.1 to 500 nM, or from 0.02 to 500 nM, or from 0.05 to 500 nM, even more preferably from 1 to 200 nM.

[0454] Dose ranges of an oligonucleotide or composition according to the invention are preferably designed on the basis of rising dose studies in clinical trials (in vivo use) for which rigorous protocol requirements exist. An oligonucleotide as defined herein may be used at a dose which is ranged from 0.01 to 200 mg/kg or 0.05 to 100 mg/kg or 0.1 to 50 mg/kg or 0.1 to 20 mg/kg, preferably from 0.5 to 10 mg/kg.

[0455] The ranges of concentration or dose of oligonucleotide or composition as given above are preferred concentrations or doses for in vitro or ex vivo uses. The skilled person will understand that depending on the identity of the oligonucleotide used, the target cell to be treated, the gene target and its expression levels, the medium used and the transfection and incubation conditions, the concentration or dose of oligonucleotide used may further vary and may need to be optimised any further.

[0456] In an embodiment of this aspect of the invention is provided a method for preventing, treating, and/or delaying Duchenne Muscular Dystrophy (DMD), Becker Muscular Dystrophy (BMD), or Spinal Muscular Atrophy (SMA), comprising administering to a subject an oligonucleotide according to the invention, or a composition according to the invention.

### Particular Embodiments of the Invention

[0457] 1. An oligonucleotide comprising:
i) Ia) at least one 2′-substituted monomer and optionally a phosphorothioate backbone linkage, or
Ib) only 2′-substituted monomers linked by phosphorothioate backbone linkages and/or by phosphodiester linkages,
ii) a 5-methylcytosine and/or a 5-methyluracil base and
iii) at least one monomer comprising a bicyclic nucleic acid (BNA) scaffold modification.
2. An oligonucleotide according to embodiment 1, wherein said oligonucleotide comprises 1, 2, 3, or 4 monomers that comprise a bicyclic nucleic acid (BNA) scaffold modification, preferably a bridged nucleic acid scaffold modification.
3. An oligonucleotide according to embodiment 1 or 2, wherein at least one bicyclic nucleic acid (BNA) scaffold modification is comprised in a terminal monomer of said oligonucleotide, preferably in the 5′-terminal monomer of said oligonucleotide, more preferably in both terminal monomers of said oligonucleotide.
4. An oligonucleotide according to any one of embodiments 1 to 3, wherein each occurrence of said bicyclic nucleic acid (BNA) scaffold modification results in a monomer that is independently chosen from the group consisting of a conformationally restrained nucleotide (CRN) monomer, a locked nucleic acid (LNA) monomer, a xylo-LNA monomer, an α-L-LNA monomer, a β-D-LNA monomer, a 2′-amino-LNA monomer, a 2′-(alkylamino)-LNA monomer, a 2′-(acylamino)-LNA monomer, a 2′-N-substituted-2′-amino-LNA monomer, a (2′-O,4′-C) constrained ethyl (cEt) LNA monomer, a (2′-O,4′-C) constrained methoxyethyl (cMOE) BNA monomer, a 2′,4′-BNA^{NC}(N—H) monomer, a 2′,4′-BNA^{NC}(N-Me) monomer, an ethylene-bridged nucleic acid (ENA) monomer, a 2′-C-bridged bicyclic nucleotide (CBBN) monomer, and derivatives thereof.
5. An oligonucleotide according to any one of embodiments 1 to 4, wherein said 2′-substituted monomer is a 2′-substituted RNA monomer, a 2′-F monomer, a 2′-amino monomer, a 2′-O-substituted monomer, a 2′-O-methyl monomer, or a 2′-O-(2-methoxyethyl) monomer, preferably a 2′-O-methyl monomer.
6. An oligonucleotide according to any one of embodiments 1 to 5, wherein all cytosine bases are 5-methylcytosine bases, and/or wherein all uracil bases are 5-methyluracil bases.
7. An oligonucleotide according to any one of embodiments 1 to 6, wherein the length of said oligonucleotide is less than 34 nucleotides.
8. An oligonucleotide according to any one of embodiments 1 to 7, wherein said oligonucleotide is complementary to or binds to or targets or hybridizes with at least a part of an exon and/or non-exon region, preferably wherein said oligonucleotide comprises or consists of a sequence which is complementary to or binds or targets or hybridizes at least a part of an exon recognition sequence (ERS), an exonic splicing silencer (ESS), an intronic splicing silencer (ISS), an SR protein binding site, or another splicing element, signal, or structure.
9. An oligonucleotide according to embodiment 8, wherein said at least part of an exon and/or non-exon region has a length of 10 to 33 nucleotides.
10. An oligonucleotide according to embodiment 8 or 9, wherein said exon and/or non-exon region is in a DMD gene or in an SMN gene.
11. An oligonucleotide according to any one of embodiments 1 to 10, wherein said oligonucleotide is represented by a nucleotide sequence comprising or consisting of SEQ ID NO: 8-1580, or by a nucleotide sequence comprising or consisting of a fragment of SEQ ID NO: 8-1580, preferably wherein said oligonucleotide is represented by a nucleotide sequence comprising or consisting of SEQ ID NO: 453, 455, 456, 459, 461, 462, 465, 467, 468, 471, 473, 474, 483, or 486, or by a nucleotide sequence comprising or consisting of a fragment of SEQ ID NO: 453, 455, 456, 459, 461, 462, 465, 467, 468, 471, 473, 474, 483, or 486.
12. An oligonucleotide according to any one of embodiments 1 to 11, wherein said oligonucleotide induces pre-mRNA splicing modulation, preferably said pre-mRNA splicing modulation alters production or composition of protein, which preferably comprises exon skipping or exon inclusion, wherein said RNA modulation most preferably comprises exon skipping.
13. An oligonucleotide according to any one of embodiments 1 to 12, wherein said oligonucleotide induces pre-mRNA splicing modulation, wherein said pre-mRNA splicing modulation alters production of protein that is related to a disease or a condition, preferably wherein said disease or condition is Duchenne Muscular Dystrophy (DMD), Becker Muscular Dystrophy (BMD), or Spinal Muscular Atrophy (SMA).
14. An oligonucleotide according to any one of embodiments 1 to 13, wherein said oligonucleotide has an improved parameter by comparison to a corresponding oligonucleotide that does not comprise a bicyclic nucleic acid (BNA) scaffold modification.
15. A composition comprising an oligonucleotide as defined in any one of embodiments 1 to 14, preferably wherein said composition comprises at least one excipient that may further aid in enhancing the targeting and/or delivery of said composition and/or said oligonucleotide to a tissue and/or cell and/or into a tissue and/or cell.
16. An oligonucleotide according to any one of embodiments 1 to 14, or a composition according to claim 15, for use as a medicament, preferably for treating, preventing, and/or delaying Duchenne Muscular Dystrophy (DMD), Becker Muscular Dystrophy (BMD), or Spinal Muscular Atrophy (SMA).
17. A method for preventing, treating, and/or delaying Duchenne Muscular Dystrophy (DMD), Becker Muscular Dystrophy (BMD), or Spinal Muscular Atrophy (SMA), comprising administering to a subject an oligonucleotide as defined in any one of embodiments 1 to 14, or a composition as defined in claim 15.
18. An oligonucleotide of 10 to 33 nucleotides in length, wherein:
[0458] a) at least one monomer has formula I:

[chemical structure]

[0459] wherein:
[0460] B is a nucleobase;
[0461] X is F, —NR¹R², or —OR;
[0462] R is alkenyl or optionally substituted alkyl, where the optional substituents, when present, are halo, OR¹, NR¹R², or SR¹;
[0463] R¹ is H, alkyl, cycloalkyl, aryl, heterocycloalkyl, or heteroaryl, each independently optionally further substituted with halo, hydroxy, or alkyl;
[0464] R² is H or alkyl; and

[chemical structure]

[0465] indicates the point of attachment to the remainder of the oligonucleotide;
[0466] b) wherein at least one monomer comprises a BNA scaffold modification and has formula II:

[chemical structure]

[0467] wherein:
[0468] B¹ is a nucleobase;
[0469] Z—Y is a divalent group selected from —(CH₂)ₙO—, —C(CH₂CH₂)O—, —CH₂WCH₂—, —(CH₂)ₙNR³—, —CH₂S(Oₘ)—, —CH(CH₃)O—, —CH(CH₂OCH₃)O—, —CH₂N(R³)O—, —CH₂CH₂—, —C(O)NR³—, —CH═CHO—, —CH₂SO₂NR³—, and —NHC(O)NH—;
[0470] n is 1 or 2;
[0471] m is 0, 1 or 2;
[0472] W is O, S, or NR³;
[0473] R³ is H, —C(O)R⁴, —C(═NH)NR⁵R⁵, benzyl, or optionally substituted alkyl, where the optional substituents, when present, are selected from halo and alkoxy;
[0474] R⁴ is alkyl, cycloalkyl or aryl;
[0475] R⁵ is H or alkyl; and

[chemical structure]

[0476] indicates the point of attachment to the remainder of the oligonucleotide;
[0477] c) wherein the monomers are linked by phosphorothioate backbone linkages and/or by phosphodiester backbone linkages; and
[0478] d) wherein at least one nucleobase in the oligonucleotide is a 5-methylcytosine or a 5-methyluracil base.
   19. The oligonucleotide according to embodiment 18, wherein R is unsubstituted alkyl, or —CH₃, or —CH₂CH₃.
   20. The oligonucleotide according to embodiment 18 or 19, wherein R¹ is CH₃.
   21. The oligonucleotide according to any of embodiments 18-20, wherein X is F or —OR.
   22. The oligonucleotide according to any of embodiments 18-21, wherein X is F or —OCH₃.
   23. The oligonucleotide of any of embodiments 18-22, wherein Z—Y is a divalent group selected from the group consisting of —(CH₂)ₙO—, —CH(CH₃)O—, and —CH(CH₂OCH₃)O—.
   24. The oligonucleotide according to any of embodiments 18-23, wherein Z—Y is —CH₂O—. Preferably, Z is —CH₂— and Y is —O—.
   25. The oligonucleotide according to any of embodiments 18-24, wherein the oligonucleotide comprises the sequence GGAAGAUGGCAU (SEQ ID NO: 6072).
   26. The oligonucleotide according to any of embodiments 18-25, wherein the oligonucleotide has a length of 16, 17, 18, 19, 20, 21, or 22 nucleotides.
   27. The oligonucleotide according to any of embodiments 18-26, wherein the oligonucleotide has a length of 19, 20 or 22 nucleotides.
   28. The oligonucleotide according to any of embodiments 18-27, wherein the oligonucleotide has a length of 20 or 22 nucleotides.
   29. The oligonucleotide according to any of embodiments 18-28, wherein the oligonucleotide has a length of 20 nucleotides.
   30. The oligonucleotide according to any of embodiments 18-28, wherein the oligonucleotide has a length of 22 nucleotides.
   31. The oligonucleotide according to any of embodiments 18-27, wherein the oligonucleotide has a length of 19 nucleotides.
   30. The oligonucleotide according to any of embodiments 18-27, wherein the oligonucleotide is represented by a sequence comprising or consisting of a sequence selected from SEQ ID NO: 453, 455, 459, 4528, 4531, 4532, 4533, 4535, 4542, 4548, and 4568.
   31. The oligonucleotide according to any of embodiments 18-26, wherein the oligonucleotide is represented by a sequence consisting of a sequence selected from SEQ ID NO: 453, 455, 459, 4528, 4531, 4532, 4533, 4535, 4542, 4548, and 4568.
   32. The oligonucleotide according to any of embodiments 18-31, wherein said oligonucleotide induces pre-mRNA splicing modulation, preferably said pre-mRNA splicing modulation alters production or composition of protein, which preferably comprises exon skipping or exon inclusion, wherein said RNA modulation most preferably comprises exon skipping.
   33. The oligonucleotide according to any of embodiments 18-32, wherein said oligonucleotide induces pre-mRNA splicing modulation, wherein said pre-mRNA splicing modulation alters production of protein that is related to a disease or a condition, preferably wherein said disease or condition is Duchenne Muscular Dystrophy (DMD), Becker Muscular Dystrophy (BMD), or Spinal Muscular Atrophy (SMA).
   34. The oligonucleotide according to any of embodiments 18-33, wherein said oligonucleotide induces pre-mRNA splicing modulation, wherein said pre-mRNA splicing modulation alters production of protein that is related to Duchenne Muscular Dystrophy (DMD).
   35. The oligonucleotide according to any of embodiments 18-33, wherein said oligonucleotide induces pre-mRNA splicing modulation, wherein said pre-mRNA splicing modulation alters production of protein that is related to Becker Muscular Dystrophy (BMD).
   36. The oligonucleotide according to any of embodiments 18-33, wherein said oligonucleotide induces pre-mRNA splicing modulation, wherein said pre-mRNA splicing modulation alters production of protein that is related to Spinal Muscular Atrophy (SMA).
   37. The oligonucleotide according to any of embodiments 18-36, wherein said oligonucleotide has an improved parameter by comparison to a corresponding oligonucleotide that does not comprise a bicyclic nucleic acid (BNA) scaffold modification.

### Definitions

[0479] In this document and in its claims, the verb “to comprise” and its conjugations is used in its non-limiting sense to mean that items following the word are included, but items not specifically mentioned are not excluded. In addition the verb “to consist” may be replaced by “to consist essentially of” meaning that an oligonucleotide or a composition as defined herein may comprise additional component(s) than the ones specifically identified, said additional component(s) not altering the unique characteristic of the invention. In addition, reference to an element by the indefinite article “a” or “an” does not exclude the possibility that more than one of the element is present, unless the context clearly requires that there be one and only one of the elements. The indefinite article “a” or “an” thus usually means “at least one”.

[0480] Each embodiment as identified herein may be combined together unless otherwise indicated. All patent and literature references cited in the present specification are hereby incorporated by reference in their entirety.

[0481] Throughout the application, the word “binds”, “targets”, “hybridizes” could be used interchangeably when used in the context of an antisense oligonucleotide which is complementary, preferably reverse complementary, to a part of a pre-mRNA as identified herein. In the context of the invention, “hybridizes” is used under physiological conditions in a cell, preferably a muscular cell unless otherwise indicated.

[0482] When a structural formula or chemical name is understood by the skilled person to have chiral centers, yet no chirality is indicated, for each chiral center individual reference is made to all three of either the racemic mixture, the pure R enantiomer, and the pure S enantiomer.

[0483] Whenever a parameter of a substance is discussed in the context of this invention, it is assumed that unless otherwise specified, the parameter is determined, measured, or manifested under physiological conditions. Physiological conditions are known to a person skilled in the art, and comprise aqueous solvent systems, atmospheric pressure, pH-values between 6 and 8, a temperature ranging from room temperature to about 37° C. (from about 20° C. to about 40° C.), and a suitable concentration of buffer salts or other components. It is understood that charge is often associated with equilibrium. A moiety that is said to carry or bear a charge is a moiety that will be found in a state where it bears or carries such a charge more often than that it does not bear or carry such a charge. As such, an atom that is indicated in this disclosure to be charged could be non-charged under specific conditions, and a neutral moiety could be charged under specific conditions, as is understood by a person skilled in the art.

[0484] Generally, a substitution replaces one moiety, which might be hydrogen, by another moiety. When considering the carbon skeleton of organic molecules, an RNA monomer is inherently 2′-substituted because it has a hydroxyl moiety at its 2′-position. A DNA monomer would therefore not be 2′-substituted, and an RNA monomer can be seen as a 2′-substituted DNA monomer. When an RNA monomer in turn is 2′-substituted, this substitution can have replaced either the 2′-OH or the 2′-H. When an RNA monomer is 2′-O-substituted, this substitution replaces the H of the 2′-OH moiety. As a non-limiting example, 2′-O-methyl RNA is a 2′-substituted monomer (—OMe substitutes —H) and a 2′-substituted RNA monomer (—OMe substitutes —OH) and a 2′-O-substituted RNA monomer (-Me substitutes —H), while 2′-F RNA is a 2′-substituted RNA monomer (—F substitutes —OH or —H) yet not a 2′-O-substituted RNA monomer (2′-O is either no longer present, or is not substituted). 2′-F RNA where F substituted 2′-OH is 2′-F-2′-deoxy RNA, which is also 2′-F DNA.

[0485] “Alkenyl” means a straight or branched hydrocarbon radical having from 2 to 8 carbon atoms and at least one double bond. In certain embodiments, alkenyl includes ethenyl, propenyl, 1 but-3-enyl, 1 pent-3-enyl, and 1-hex-5-enyl.

[0486] “Alkoxy” means a group of the formula —OR, where R is alkyl. In certain embodiments, alkoxy includes methoxy, ethoxy, propoxy, 2-propoxy, butoxy, tert-butoxy, pentyloxy, and hexyloxy.

[0487] “Alkyl” means a straight or branched saturated hydrocarbon radical containing from 1-20 carbon atoms, and in certain embodiments includes 1-6 carbon atoms. In certain embodiments, alkyl includes 1-4 carbon atoms, and in certain embodiments includes 1-3 carbon atoms. In certain embodiments, alkyl includes methyl, ethyl, n-propyl, iso-propyl, n-butyl, sec-butyl, tert-butyl, n-pentyl, isopentyl, neopentyl, n-hexyl, 3-methylhexyl, 2,2-dimethylpentyl, 2,3-dimethylhexyl, n-heptyl, n-octyl, n-nonyl, and n-decyl.

[0488] “Aryl” means a monovalent six- to fourteen-membered, mono-, bi-, or tri-carbocyclic ring, wherein the monocyclic ring is aromatic and at least one of the rings in the bicyclic or tricyclic ring is aromatic. In certain embodiments, aryl includes phenyl, naphthyl, indanyl, and anthracenyl.

[0489] “Cycloalkyl” means a monocyclic or bicyclic, saturated or partially unsaturated (but not aromatic), hydrocarbon radical of three to ten carbon ring atoms. In certain embodiments, the cycloalkyl group contains from 5-6 carbon atoms, it may be referred to herein as C₅₋₆ cycloalkyl. Cycloalkyl groups include fused, bridged and spirocycloalkyl bicyclic rings. For example, when fused, the cycloalkyl group may comprise two rings that share adjacent atoms (e.g., one covalent bond). When bridged, the cycloalkyl group may comprise two rings that share three or more atoms, separating the two bridgehead atoms by a bridge containing at least one atom. When spiro, the cycloalkyl group may comprise two rings that share only one single atom, the spiro atom, which may be, for example, a quaternary carbon. In certain embodiments, cycloalkyl groups include cyclopropyl, cyclobutyl, cyclopentyl, and cyclohexyl. In certain embodiments, cycloalkyl groups include:

[chemical structure]

[0490] “Halo” means a fluoro, chloro, bromo, or iodo group. “Halo” preferably means fluoro. “Halo” can be replaced by a halogen. Preferred halogens are fluorine, chlorine, bromine, or iodine. A most preferred halogen is fluorine.

[0491] “Heteroaryl” means monocyclic, fused bicyclic, or fused tricyclic, radical of 5 to 14 ring atoms containing one or more, in another example one, two, three, or four ring heteroatoms independently selected from —O—, —S(O)ₙ— (n is 0, 1, or 2), —N═ (trivalent nitrogen), —N(H)—, and >N-oxide, and the remaining ring atoms being carbon, wherein the ring comprising a monocyclic radical is aromatic and wherein at least one of the fused rings comprising a bicyclic or tricyclic radical is aromatic (but does not have to be a ring which contains a heteroatom, e.g. 2,3-dihydrobenzo[b][1,4]dioxin-6-yl). Fused bicyclic radical includes bridged ring systems. Unless stated otherwise, the valency may be located on any atom of any ring of the heteroaryl group, valency rules permitting.

[0492] In certain embodiments, heteroaryl includes, but is not limited to, triazolyl, tetrazolyl, pyrrolyl, imidazolyl, thienyl, furanyl, pyrazolyl, oxazolyl, isoxazolyl, oxadiazolyl, thiadiazolyl, indolyl, indazolyl, phthalimidyl, benzimidazolyl, benzoxazolyl, benzofuranyl, benzothienyl, benzopyranyl, benzothiazolyl, pyridinyl, pyrazinyl, pyrimidinyl, pyridazinyl, quinolinyl, isoquinolinyl, and tetrahydroisoquinolinyl.

[0493] “Heterocycloalkyl” means a saturated or partially unsaturated (but not aromatic) monovalent monocyclic group of 3 to 9 ring atoms or a saturated or partially unsaturated (but not aromatic) monovalent bicyclic group of 5 to 12 ring atoms in which one or more ring atoms is a heteroatom independently selected from —O—, —S(O)ₙ— (n is 0, 1, or2), —N═ (trivalent nitrogen), or —NH—, and the remaining ring atoms are carbon. Heterocycloalkyl groups include fused, bridged and spiro heterocycloalkyl bicyclic rings. For example, when fused, the heterocycloalkyl group may comprise two rings that share adjacent atoms (e.g., one covalent bond). When bridged, the heterocycloalkyl group may comprise two rings that share three or more atoms, separating the two bridgehead atoms by a bridge containing at least one atom. When spiro, the heterocycloalkyl group may comprise two rings that share only one single atom, the spiro atom, which may be, for example, a quaternary carbon. In certain embodiments, the heterocycloalkyl group comprises one, two, three, or four ring heteroatoms, independently selected from —O—, —S(O)ₙ— (n is 0, 1, or 2), —N═ (trivalent nitrogen), or —NH—.

[0494] In certain embodiments, the heterocycloalkyl group contains from 5 or 6 ring atoms. In certain embodiments, heterocycloalkyl includes, but is not limited to, azetidinyl, pyrrolidinyl, piperidinyl, morpholinyl, piperazinyl, pyranyl, tetrahydropyranyl, tetrahydrothiopyranyl, dioxinyl, thiomorpholinyl, pyrazolidinyl, imidazolinyl, imidazolidinyl, oxazolinyl, oxazolidinyl, isoxazolidinyl, thiazolinyl, thiazolidinyl, and tetrahydrofuryl.

[0495] In the context of this invention, a decrease or increase of a parameter to be assessed means a change of at least 5% of the value corresponding to that parameter. More preferably, a decrease or increase of the value means a change of at least 10%, even more preferably at least 20%, at least 30%, at least 40%, at least 50%, at least 70%, at least 90%, or 100%. In this latter case, it can be the case that there is no longer a detectable value associated with the parameter.

[0496] The use of a substance as a medicament as described in this document can also be interpreted as the use of said substance in the manufacture of a medicament. Similarly, whenever a substance is used for treatment or as a medicament, it can also be used for the manufacture of a medicament for treatment.

[0497] The word “about” or “approximately” when used in association with a numerical value (e.g. about 10) preferably means that the value may be the given value (of 10) more or less 0.1% of the value.

[0498] Compounds or compositions according to this invention are preferably for use in methods or uses according to this invention.

[0499] As will be understood by a skilled person, throughout this application, the terms “BNA”, “BNA scaffold”, “BNA nucleotide”, “BNA nucleoside”, “BNA modification”, or “BNA scaffold modification” may be replaced by conformationally restricted scaffold modification, locked scaffold modification, locked nucleotide, locked nucleoside, locked monomer, or Tm enhancing scaffold modification, or high-affinity modification and the like, as appropriately.

[0500] The following examples are offered for illustrative purposes only, and are not intended to limit the scope of the present invention in any way.

### LEGENDS TO THE FIGURES

[0501] FIG. 1.

[0502] The effect of implementation of a 5′ and/or 3′ BNA scaffold-modified nucleotide on AON-induced DMD exon 51 skipping (FIG. 1A) and dystrophin production (FIG. 1B) in a DMD patient (del. exon 48-50) muscle cell culture, compared to an iso-sequential AON without BNA modification based on SEQ ID NO:452. The BNA modification in this case is LNA (SEQ ID NOs shown in the figure relate to SEQ ID NOs where the BNA scaffold modifications as indicated result in an LNA monomer). (FIG. 1A): Average exon 51 skipping percentages were determined by RT-ddPCR analysis of triplicate RNA samples, error bars indicate standard deviation, AON (800 nM or 4 μM). (FIG. 1B): Average chemiluminescence values (area under curve (AUC) from electropherogram) were measured by Simple Western Capillary Immunoassay; high to low protein concentrations were loaded HC=healthy control muscle sample, NT=non-treated sample, AON concentration 800 nM.

[0503] FIG. 2.

[0504] The effect of implementation of a 5′ and/or 3′ BNA scaffold-modified nucleotide on AON-induced DMD exon 51 skipping in a DMD patient (del. exon 48-50) muscle cell culture, compared to an iso-sequential AON without BNA modification based on SEQ ID NO:452. The BNA modification in FIG. 2A is CRN (SEQ ID NOs: 453C and 455C shown in the figure relate to SEQ ID NO: 453 and 455 where the BNA scaffold modifications as indicated result in a CRN monomer). The BNA modification in FIG. 2B is 2′-amino-2′-deoxy LNA, which in this application is referred to as 2′-amino-LNA (SEQ ID NO: 456A shown in the figure relate to SEQ ID NO: 456 where the BNA scaffold modification as indicated result in a 2′-amino-LNA monomer). Average exon 51 skipping percentages were determined by RT-ddPCR analysis of triplicate RNA samples, error bars indicate standard deviation, AON concentration 800 nM (FIG. 2B) or 4 μM (FIG. 2A, FIG. 2B).

[0505] FIG. 3.

[0506] The effect of implementation of a 5′ and/or 3′ BNA scaffold-modified nucleotide on AON-induced DMD exon 51 skipping in the hDMD mouse model after 12 wks of IV treatment (100 mg/kg AON weekly). The BNA modification in this case is LNA (SEQ ID NOs shown in the figure relate to SEQ ID NOs where the BNA scaffold modifications as indicated result in an LNA monomer). Average exon 51 skipping percentages were determined by RT-ddPCR analysis of muscle RNA samples.

[0507] FIG. 4.

[0508] The effect of implementation of at least one BNA scaffold-modified nucleotide on AON-induced DMD exon 51 skipping in a DMD patient (del. exon 48-50) muscle cell culture, compared to an iso-sequential AON without BNA modification based on SEQ ID NO: 452 (all at 800 nM). The BNA modification in this case results in LNA (SEQ ID NOs shown in the figure relate to SEQ ID NOs where the BNA scaffold modifications as indicated result in an LNA monomer). Average fold increase of exon 51 skipping levels over SEQ ID NO: 452 are based on RT-ddPCR analysis of triplicate RNA samples.

[0509] FIG. 5.

[0510] The effect of implementation of a 5′ and 3′ BNA scaffold-modified nucleotide on AON-induced DMD exon 44 skipping (FIG. 5A, SEQ ID NO: 29), exon 45 skipping (FIG. 5B, SEQ ID NO: 3185), and exon 53 skipping (FIG. 5C, SEQ ID NO: 863) in healthy human muscle cells, compared to iso-sequential AONs without BNA scaffold modifications (SEQ ID NO: 26 (exon 44), SEQ ID NO: 6049 (exon 45), and SEQ ID NO: 860 (exon 53). The BNA modification in this case results in LNA (SEQ ID NOs shown in the figure relate to SEQ ID NOs where the BNA scaffold modifications as indicated result in an LNA monomer). The average exon skipping percentages were determined by RT-ddPCR analysis of RNA samples (n=6), error bars indicate standard deviation, AON (800 nM or 4 μM).

### EXAMPLES

### Example 1 (In Vitro)

### Material and Methods

### AONs

[0511] Antisense oligonucleotides (AONs) (Table 1, FIG. 1-3) had a phosphorothioate backbone with 2′-O-methyl monomers and either LNA (SEQ ID NO:452, 453, 455, and 456), or 2′-amino-LNA (SEQ ID NO:456A), or CRN (SEQ ID NO:453C and 455C) scaffold modification. The AON with SEQ ID NO:452 featured cytosines, the other SEQ ID NOs featured 5-methylcytosines. 2′-amino-LNA refers to the scaffold modification that is also sometimes named 2′-amino-2′-deoxy LNA The AONs were synthesized in 10 μmol scale using an OP-10 synthesizer (GE/ÅKTA Oligopilot), through standard phosphoramidite protocols. The AONs were cleaved and deprotected in a two-step sequence (diethylamine followed by conc. NH₄OH treatment), purified by HPLC and dissolved in water and an excess of NaCl was added to exchange ions. After evaporation, the AONs were redissolved in water, desalted by FPLC and lyophilized. Mass spectrometry confirmed the identity of all AONs, and purity (determined by UPLC) was found acceptable for all AONs (>80%).

TABLE 1

| | Chemical | | | |
|---|---|---|---|---|
| | Modifi- | | | SEQ |
| AON ID | cation | Sequence | Length | ID NO |
| NO: 452 | 2OMe/PS | UCAAGGAAGA | 20 | 452 |
| | | UGGCAUUUCU | | |
| NO: 453(C) | 2OMe/ | TCAAGGAAGA | 20 | 453 |
| | BNA/PS | UGGCAUUUCU | | |
| NO: 455(C) | 2OMe/ | TCAAGGAAGA | 20 | 455 |
| | BNA/PS | UGGCAUUUCT | | |
| NO: 456(A) | 2OMe/ | TCAAGGAAGA | 20 | 456 |
| | BNA/PS | UGGCAUUUCU | | |

A = adenosine,
G = guanine,
U = uracil,
T = thymine,
C = cytosine,
C = 5-methylcytosine,
and
T = BNA nucleotide;
2OMe details that the AON comprises 2′-O-methyl substitutions in all non-BNA monomers;
PS details that the AON exclusively comprises phosphorothioate backbone linkages

Gymnotic Uptake and cDNA Synthesis

[0512] Immortalized myoblasts, derived from a DMD patient with a deletion of exons 48-50 (Δ48-50), were cultured to confluency in 6-wells plates. To induce the formation of myotubes, proliferation medium was replaced by low-serum differentiation medium for 5 days, supplemented with 800 nM or 4 μM of AON (in triplicate) according to non-GLP standard operating procedures. Total RNA was then isolated and 1000 ng of RNA was used as input for the cDNA synthesis using random hexamer primers.

Digital Droplet (dd)PCR Analysis

[0513] Specific Taqman minor groove binder (MGB) assays were designed to detect the dystrophin transcript products with and without exon 51 (Table 2) and were purchased from Applied Biosystems. Digital droplet PCR analysis was performed on 1 μl (for non-skipped transcript) or 4 μl (for skipped transcript) of cDNA in a 20 μl reaction volume using an annealing/extension temperature of 60° C. according to the manufacturer's instructions (BioRad). Data was presented as percentage exon skip [N₀ skipped/(N₀ skipped+N₀ non-skipped)*100].

TABLE 2

| | Target | | | Amplicon | SEQ |
|---|---|---|---|---|---|
| Assay | Exons | Sequences | | length | ID NO |
| DMD_47- | 47/52 | Forward | TGAAAATAA | 71 | 1586 |
| 52 | | primer | GCTCAAGCA | | |
| | | | GACAAATC | | |
| | | Reverse | GACGCCTCT | | 1587 |
| | | primer | GTTCCAAAT | | |
| | | | CC | | |
| | | Probe | CAGTGGATA | | 1588 |
| | | | AAGGCAACA | | |
| DMD_51- | 51/52 | Forward | GTGATGGTG | 82 | 1589 |
| 52.2 | | primer | GGTGACCTT | | |
| | | | GAG | | |
| | | Reverse | GACGCCTCT | | 1590 |
| | | primer | GTTCCAAAT | | |
| | | | CC | | |
| | | Probe | CAAGCAGAA | | 1591 |
| | | sequence | GGCAACAA | | |

### Simple Western Capillary Immunoassay

[0514] Total protein was extracted in protein loading buffer (6% 1.25 M Tris-HCl pH 6.8, 20% glycerol, 15% SDS, 0.0016% bromophenol blue, 5% β-mercaptoethanol (all Sigma) with protease inhibitor (Roche)). Protein concentration was measured using a Compat-Able Protein Assay Preparation Reagent Set (Thermo scientific) and a Pierce BCA Protein Assay Kit (Thermo scientific). For the healthy human control cell sample 50, 5 or 0.5 μg/mL was applied, for the DMD patient cell samples 100, 50, or 10 μg/mL. Dystrophin protein levels were quantified using Simple Western Capillary Immunoassay (Protein Simple) and WES 66-440 kDa Rabbit Master Kit (Protein Simple cat. # PSMK20) according to manufacturer's protocols. The WES plate was loaded with biotinylated ladder, samples, primary rabbit polyclonal anti-dystrophin antibody (Abcam, cat.# ab15277, 1:50 diluted in supplied antibody diluent), streptavidin-HRP for ladder detection, secondary anti-rabbit antibody, luminol-peroxide mix and wash buffer (all supplied in the WES master kit). The plate was centrifuged for 5 minutes at 2500 rpm at room temperature and loaded in the WES equipment together with the corresponding capillary cartridge. After running the assay, data was analyzed using Compass software.

### Results

[0515] Implementation of at least one 5′ and/or 3′ BNA scaffold-modified nucleotide in an AON improves exon 51 skipping levels when compared to an iso-sequential AON without BNA scaffold-modified nucleotide (based on SEQ ID NO:452). FIG. 1A shows this effect for three AONs (SEQ ID NO: 453, NO:455, and NO:456) at low (800 nM) and high (4 μM) concentration in DMD patient muscle cells in vitro. The BNA scaffold modification in this case is LNA. Compared to the AON without BNA scaffold modifications based on SEQ ID NO:452, the AONs with LNA nucleotides induced 4- to 8-fold higher exon 51 skipping levels. This was associated with an even higher improvement in dystrophin levels (up to 20-fold with SEQ ID NO:456) (FIG. 1B). A similar effect was obtained with implementation of a 5′ and/or 3′ CRN scaffold-modified (SEQ ID NO: 453C and 455C) or 2′-amino-LNA scaffold-modified (SEQ ID NO: 456A) nucleotide when compared to the AON without BNA scaffold modifications based on SEQ ID NO:452 at 800 nM and/or 4 μM (FIG. 2A, B).

### Example 2 (In Vivo)

### Material and Methods

### AONs

[0516] Antisense oligonucleotides (AONs) (Table 1, FIG. 3) had a full phosphorothioate backbone with 2′-O-methyl substitutions in all non-BNA monomers, 5-methylcytosines and BNA scaffold modifications resulting in LNA monomers (SEQ ID NOs: 453, 455, and 456). The control AON with SEQ ID NO: 452 had a phosphorothioate backbone with 2′-O-methyl monomers, cytosines, and no BNA scaffold modifications. The AONs were synthesized on a 1 mmol scale using an OP-100 synthesizer (GE/ÅKTA Oligopilot), through standard phosphoramidite protocols. The AONs were cleaved and deprotected in a two-step sequence (diethylamine followed by conc. NH₄OH treatment), purified by anion-exchange chromatography, desalted by ultrafiltration/diafiltration, and lyophilized. Mass spectrometry confirmed the identity of all AONs, and purity (determined by UPLC) was found acceptable for all AONs (>85%).

### Mouse Experiment

[0517] This mouse experiment was carried out according to the National Institute of Health (NIH) guidelines for the care and use of laboratory animals. hDMD mice were bred and genotyped by JAX Labs (USA). Mice were randomized into groups (n=15) taking into account baseline weight and male-female distribution. Mice received 1x weekly an intravenous tail vein injection with 100 mg/kg of each of the AONs with SEQ ID NO: 452, 453, 455, or 456, and starting at 5-6 weeks of age for a total of 12 weeks (SEQ ID NO: 452 does not comprise any BNA scaffold modifications in this case). Four days after the last AON injection the animals were sacrificed and tissue samples collected (after transcardial perfusion with PBS in order to remove blood from the tissues). Muscle tissues samples were snap frozen and stored at −80° C.

RNA Isolation and cDNA Synthesis

[0518] Tissues were homogenized in 1 ml RNA-Bee (Bio-Connect) by grinding in a MagNa Lyser using MagNA Lyser Green Beads (Roche). Total RNA was extracted from the homogenate based on the manufacturer's instructions. For cDNA synthesis 1000 ng of total RNA was used as input. cDNA was generated in 20 μl reactions using random hexamer primers and Transcriptor Reverse transcriptase according to the manufacturer's instructions (Roche), with the exception that incubation took place for 40 minutes at 50° C. instead of 30 minutes at 55° C.

### Digital Droplet PCR Analysis

[0519] Specific Taqman minor groove binder (MGB) assays were designed (using Primer Express 3.0.1 software; Applied Biosystems) to detect the dystrophin transcript products with and without exon 51 (Table 2) and purchased from Applied Biosystems. Digital droplet PCR analysis was performed on 2 or 4 μl of cDNA in a 20 μl reaction volume using an annealing/extension temperature of 60° C. according to the manufacturer's instructions (BioRad). Data was presented as percentage exon skip [N₀ skipped/(N₀ skipped+N₀ non-skipped)*100].

### Results

[0520] Transgenic hDMD mice expressing full length human dystrophin allow in vivo screening of human-specific AONs in a mouse experimental background. Note that this model is not dystrophin-deficient and has no muscle pathology. Therefore the uptake of AONs by muscle tissue is typically lower than that in the mdx mouse model. In this experiment, three AONs with 5′ and/or 3′ BNA-scaffold modified nucleotides (SEQ ID NO: 453, 455, and 456, using LNA scaffold modifications) were compared to the iso-sequential AON without BNA scaffold modified nucleotides (SEQ ID NO:452) in a 12 wks systemic (IV) hDMD study. FIG. 3 shows improved in vivo exon 51 skipping levels for all LNA-containing AONs, up to 8-fold with AON of SEQ ID NO:455 when compared to AON of SEQ ID NO:452.

### Example 3 (In Vitro)

### AONs

[0521] The antisense oligonucleotides (AONs) of the invention (Table 3, FIG. 4) comprised a full phosphorothioate backbone with 2′-O-methyl substitutions in all non-BNA monomers, 5-methylcytosines, and at least one BNA scaffold modification resulting in an LNA monomer (SEQ ID NOs: 455, 459, 4528, 4531, 4532, 4533, 4535, 4542, 4548, and 4568). The control AON with SEQ ID NO: 452 comprised a phosphorothioate backbone with 2′-O-methyl monomers, cytosines and no BNA scaffold modifications. The AONs were synthesized in 5 μmol scale using an OP-10 synthesizer (GE/ÅKTA Oligopilot), through standard phosphoramidite protocols. The AONs were cleaved and deprotected in a two-step sequence (DEA followed by conc. NH₄OH treatment), purified by anion-exchange chromatography, desalted by size exclusion chromatography and lyophilized. Mass spectrometry confirmed the identity of all AONs, and purity (determined by UPLC) was found acceptable for all AONs (>80%).

TABLE 3

| SEQ | Chemical | |
|---|---|---|
| ID NO: | Modification | Sequence |
| 452 | 2OMe/PS | UCAAGGAAGAUGGCAUUUCU |
| 455 | 2OMe/PS/LNA | TCAAGGAAGAUGGCAUUUCT |
| 459 | 2OMe/PS/LNA | TCAAGGAAGAUGGCAUUUCUAG |
| 4528 | 2OMe/PS/LNA | TCAAGGAAGAUGGCAUUUCUAG |
| 4531 | 2OMe/PS/LNA | TCAAGGAAGAUGGCAUUUCUAG |
| 4532 | 2OMe/PS/LNA | TCAAGGAAGAUGGCAUUUCUAG |
| 4533 | 2OMe/PS/LNA | TCAAGGAAGAUGGCAUUUCUAG |
| 4535 | 2OMe/PS/LNA | TCAAGGAAGAUGGCAUUUCT |
| 4542 | 2OMe/PS/LNA | TCAAGGAAGAUGGCAUUUCT |
| 4548 | 2OMe/PS/LNA | CAAGGAAGAUGGCAUUUCT |
| 4568 | 2OMe/PS/LNA | GGUAAGUUCUGUCCAAGC |

A = adenosine,
G = guanine,
U = uracil,
T = thymine,
C = cytosine,
C = 5-methylcytosine,
and
T = LNA nucleotide;
2OMe details that the AON comprises 2′-O-methyl substitutions in all non-BNA monomers;
PS details that the AON exclusively comprises phosphorothioate backbone linkages

Gymnotic Uptake and cDNA Synthesis

[0522] Immortalized myoblasts, derived from a DMD patient with a deletion of exons 48-50 (A48-50), were cultured to confluency in 6-wells plates. To induce the formation of myotubes, proliferation medium was replaced by low-serum differentiation medium for 7 days, supplemented with 800 nM AON (in triplicate) according to non-GLP standard operating procedures. Total RNA was then isolated and 1000 ng of RNA was used as input for the cDNA synthesis using random hexamer primers.

Digital Droplet (dd)PCR Analysis

[0523] Specific Taqman minor groove binder (MGB) assays were designed to detect the dystrophin transcript products with and without exon 51 (Table 2) and were purchased from Applied Biosystems. Digital droplet PCR analysis was performed on 1 μl (for transcript without exon skip) or 4 μl (for transcript with exon skip) of cDNA in a 20 μl reaction volume using an annealing/extension temperature of 60° C. according to the manufacturer's instructions (BioRad). Data was presented as percentage exon skip [N₀ skipped/(N₀ skipped+N₀ non-skipped)*100].

### Results

[0524] Implementation of at least one BNA scaffold-modified nucleotide (resulting in an LNA monomer) in an AON improves exon 51 skipping levels when compared to an iso-sequential AON without a BNA scaffold modification (based on SEQ ID NO: 452). FIG. 4 shows this effect for ten AONs (SEQ ID NOs: 455, 459, 4528, 4531, 4532, 4533, 4535, 4542, 4548, and 4568) at 800 nM concentration in DMD patient muscle cells in vitro. Compared to the AON without a BNA scaffold modification (SEQ ID NO: 452), the AONs with LNA nucleotides induced 10- to 40-fold higher exon 51 skipping levels.

### Example 4 (In Vitro)

### Material and Methods

### AONs

[0525] The antisense oligonucleotides (AONs) of the invention (Table 4, FIG. 5) comprised a full phosphorothioate backbone with 2′-O-methyl substitutions, 5-methylcytosines, and at least one BNA scaffold modification resulting in an LNA monomer (SEQ ID NOs: 29, 3185, and 863). The control AONs comprised a full phosphorothioate backbone with only 2′-O-methyl substituted monomers, 5-methylcytosines, but no BNA scaffold modification (SEQ ID NO: 26, 6049, and 860; for SEQ ID NO: 6049, these modifications make it identical to SEQ ID NO: 6071). The AONs were synthesized in 5 μmol scale using an OP-10 synthesizer (GE/ÅKTA Oligopilot), through standard phosphoramidite protocols. The AONs were cleaved and deprotected in a two-step sequence (DEA followed by conc. NH₄OH treatment), purified by anion-exchange chromatography, desalted by size exclusion chromatography and lyophilized. Mass spectrometry confirmed the identity of all AONs, and purity (determined by UPLC) was found acceptable for all AONs (>80%).

TABLE 4

| SEQ | Chemical | |
|---|---|---|
| ID NO: | Modification | Sequence |
| 26 | 2OMe/PS | UCAGCUUCUGUUAGCCACUG |
| 29 | 2OMe/PS/LNA | TCAGCUUCUGUUAGCCACUG |
| 6049 | 2OMe/PS | UUUGCCGCUGCCCAAUGCCAUCCUG |
| 3185 | 2OMe/PS/LNA | TUUGCCGCUGCCCAAUGCCAUCCUG |
| 860 | 2OMe/PS | GUUGCCUCCGGUUCUGAAGGUGUUC |
| 863 | 2OMe/PS/LNA | GUUGCCUCCGGUUCUGAAGGUGUUC |

A = adenosine,
G = guanine
U = uracil,
T = thymine,
C = 5-methylcytosine,
and
T = LNA nucleotide;
2OMe details that the AON comprises 2′-O-methyl substitutions in all non-BNA monomers;
PS details that the AON exclusively comprises phosphorothioate backbone linkages

Gymnotic Uptake and cDNA Synthesis

[0526] Immortalized myoblasts, derived from a healthy donor, were cultured to confluency in 12-wells plates. To induce the formation of myotubes, proliferation medium was replaced by low-serum differentiation medium for 7 days, supplemented with 800 nM or 4 μM of AON (n=6) according to non-GLP standard operating procedures. Total RNA was then isolated and 1000 ng of RNA was used as input for the cDNA synthesis using random hexamer primers.

Digital Droplet (dd)PCR Analysis

[0527] Specific Taqman minor groove binder (MGB) assays were designed to detect the dystrophin transcript products with and without exon 44, 45, or 53 (Table 5) and were purchased from Applied Biosystems. Digital droplet PCR analysis was performed on 1 μl (for transcript without exon skip) or 4 μl (for transcript with exon skip) of cDNA in a 20 μl reaction volume using an annealing/extension temperature of 60° C. according to the manufacturer's instructions (BioRad). Data was presented as percentage exon skip [N₀ skipped/(N₀ skipped+N₀ non-skipped)*100].

TABLE 5

| | | Primer/Probe | Amplicon | SEQ |
|---|---|---|---|---|
| Assay | | Sequences (5′-3′) | length | ID NO: |
| DMD | Forward | CCCAGCTTGATTTCCAA | 83 | 6050 |
| 43-45 | | TGG | | |
| | Reverse | GCCGCTGCCCAATGC | | 6051 |
| | Probe | ACCGACAAGGGAACTC | | 6052 |
| DMD | Forward | TGGGAACATGCTAAATA | 62 | 6053 |
| 44-45 | | CAAATGG | | |
| | Reverse | TGCCGCTGCCCAATG | | 6054 |
| | Probe | ATCTTAAGGAACTCCAG | | 6055 |
| | | GATG | | |
| DMD | Forward | GAGAATTGGGAACATGC | 110 | 6056 |
| 44-46.2 | | TAAATACAA | | |
| | Reverse | CCTCCAACCATAAAACA | | 6057 |
| | | AATTCATT | | |
| | Probe | TATCTTAAGGCTAGAAG | | 6058 |
| | | AACAA | | |
| DMD | Forward | CCAGCAATCAAGAGGCT | 92 | 6059 |
| 52-54 | | AGAACA | | |
| | Reverse | TCATTTGCCACATCTAC | | 6060 |
| | | ATTTGTCT | | |
| | Probe | ATTACGGATCGAACAGT | | 6061 |
| | | TG | | |
| DMD | Forward | GTCCCTATACAGTAGAT | 75 | 6062 |
| 53-54 | | GCAATCCAA | | |
| | Reverse | GCCACTGGCGGAGGTCT | | 6063 |
| | | T | | |
| | Probe | ACAGAAACCAAGCAGTT | | 6064 |
| | | G | | |

### Results

[0528] Implementation of BNA scaffold modifications resulting in LNA monomers at both the 5′ and 3′ end of AONs targeting DMD exon 44, exon 45, or exon 53, improved exon skipping levels in healthy human control myotubes in vitro 2- to 3-fold when compared to iso-sequential AONs without BNA scaffold-modifications. FIG. 5 shows this effect for three AONs (SEQ ID NO: 29 (targeting exon 44), SEQ ID NO: 3185 (targeting exon45), and SEQ ID NO:863 (targeting exon 53), at low (800 nM) and high (4 μM) concentrations. Note that exon skip levels in healthy human myotubes are typically lower than those obtained in DMD patient muscle cells (as used in Example 1). This is explained by the nonsense-mediated decay of out-of-frame transcripts resulting from AON-induced exon skipping in healthy muscle cells.

### LIST OF REFERENCES

[0529] Dominski and Kole, PNAS 1993, 90(18):8673-8677
[0530] Friedman et al., J Biol Chem 1999, 274(51):36193-36199
[0531] Uchikawa et al., J Hum Genet 2007, 52(11):891-897
[0532] Williams et al., Oligonucleotides 2006, 16(2):186-95
[0533] Vickers et al., J Immunol 2006, 176(6):3652-61
[0534] Karras et al., Biochemistry 2001, 40(26):7853-9
[0535] Vetrini et al., Hum Mutat 2006, 27(5):420-6
[0536] Du et al., PNAS 2007, 104(14):6007-12
[0537] Rincon et al., Am J Hum Genet 2007, 81(6):1262-1270
[0538] Tyson-Capper et al., Mol Pharmacol 2006, 69(3):796-804
[0539] Khoo et al., BMC Mol Biol 2007, 8; 3
[0540] Renshaw et al., Mol Cancer Ther 2004, 3(11):1467-84
[0541] Giles et al., Antisense Nucleic Acid Drug Dev 1999, 9(2):213-20
[0542] Goto et al., J Invest Dermatol 2006, 126(12):2614-20
[0543] Disterer et al., Mol Ther 2013, 21(3):602-609
[0544] Uehara et al., FASEB J 2013, 27(1):76-85
[0545] Gedicke-Hornung et al., EMBO Mol Med 2013, 5(7):1060-77
[0546] Lentz et al., Nat Med 2013, 19(3):345-350
[0547] Taniguchi-lkeda et al., Nature 2011, 478(7367):127-31
[0548] Owen et al., PLoS One 2012, 7(3):e33576
[0549] Zammarchi et al., PNAS 2011, 108(43):17779-84
[0550] Mercatante et al., J Biol Chem 2002, 277(51):49374-82
[0551] Osorio et al., Sci Transl Med 2011, 3(106):106ra107
[0552] Wein et al., Hum Mut 2010, 31(2):136-42
[0553] Gao et al., Cell Transplant 2008, 17(7):723-34
[0554] Peacey et al., NAR 2012, 40(19):9836-49
[0555] Wheeler et al., J Clin Invest 2007, 117(12):3952-7
[0556] Evers et al., Nucleic Acid Ther 2014, 24(1):4-12
[0557] van Ommen, van Deutekom, Aartsma-Rus, Curr Opin Mol Ther. 2008; 10(2):140-9.
[0558] Yokota, Duddy, Partidge, Acta Myol. 2007; 26(3):179-84.
[0559] van Deutekom et al., N Engl J Med. 2007; 357(26):2677-86.
[0560] Goemans et al., N Engl J Med. 2011; 364(16):1513-22.
[0561] Cirak et al., Lancet 2011; 378: 595-605.
[0562] Voit et al., Lancet Neurol 2014, 13(10):987-96
[0563] Heemskerk et al., Mol Ther 2010; 18(6):1210-7.
[0564] Evers et al. PLoS ONE 2011, 6 (9) e24308
[0565] Gao et al., Mol Ther Nucleic Acids 2015, 4:e255
[0566] Goyenvalle et al., Nat Med 2015, 21(3):270-5
[0567] Khoo and Krainer, Curr Opin Mol Ther 2009, 11(2):108-15
[0568] Singh et al., Mol Cell Biol 2006, 26(4):1333-46
[0569] Hua et al., Am J Hum Genet 2008, 82(4): 834-48
[0570] Hua et al., Genes Dev 2010, 24(15):1634-44
[0571] Hua et al., Nature 2011, 478(7367):123-6
[0572] Passini et al., Sci Transl Med 2011, 3(72):72ra18
[0573] Swoboda et al., J Clin Invest 2014, 124(2): 487-90
[0574] Chiriboga et al., Neurology 2016, 86(10):890-7
[0575] Braida C., et al, Human Molecular Genetics, 2010, vol 9: 1399-1412
[0576] Aartsma-Rus et al., Hum Mol Gen 2003; 12(8):907-14.
[0577] Yu R Z., Anal Biochem 2002; 304: 19-25.
[0578] Dorn and Kippenberger, Curr Opin Mol Ther 2008; 10(1): 10-20
[0579] Krieg AM. et al., Nature 1995; 374: 546-549.
[0580] Krieg, A. M., Curr. Opin. Immunol. 2000; 12: 35-43.
[0581] Han et al., Nature Communications, 2016, doi:10.1038/ncomms10981
[0582] Wagner, H., Adv. Immunol. 1999; 73: 329-368.
[0583] Popovic P J. et al. J of Immunol 2006; 177: 8701-8707.
[0584] Diebold S. S., et. al., Eur J Immunol. 2006; December; 36(12):3256-67.
[0585] Peacock H et al. J. Am. Chem. Soc. 2011, 133, 9200
[0586] Arai K et al. Bioorg. Med. Chem. 2011, 21, 6285
[0587] Ehmsen J. et al, J. Cell Sci. 2002, 115 (Pt14): 2801-2803.
[0588] Monaco A. P., et al., Genomics 1988; 2: 90-95.
[0589] Manzur A. Y. et al., Wiley publishers, 2008. The Cochrane collaboration.
[0590] Hodgetts S., et al, Neuromuscular Disorders 2006; 16: 591-602.
[0591] Zuker M., et al, Nucleic Acids Res. 2003; 31(13):3406-15.
[0592] Cartegni L, et al, Nat Rev Genet 2002; 3(4):285-98.
[0593] Cartegni L, et al, Nucleic Acids Res 2003; 31(13):3568-71
[0594] Remington: The Science and Practice of Pharmacy, 20th Edition.
[0595] Baltimore, Md.: Lippincott Williams & Wilkins, 2000
[0596] Kumar L, Pharm. Technol. 2008, 3, 128
[0597] Bruno, K., Advanced Drug Delivery Reviews 2011; 63: 1210.
[0598] doi: 10.1021/ja710342q
[0599] Seth et al., J. Org. Chem. 2010, 75, 1569-1581
[0600] doi: 10.1093/nass/1.1.241
[0601] doi: 10.1021/jo100170g
[0602] Osawa et al., J. Org. Chem., 2015, 80 (21), pp 10474-10481
[0603] WO 2014/145356 (MiRagen Therapeutics)
[0604] WO 2014/126229 (Mitsuoka Y et al.)
[0605] Yamamoto et al. Org. Biomol. Chem. 2015, 13, 3757
[0606] Nishida et al. Chem. Commun. 2010, 46, 5283
[0607] WO 2014/112463 (Obika S et al.)
[0608] WO 2015/142910 (Ionis Pharmaceuticals)
[0609] Hanessian et al., J. Org. Chem., 2013, 78 (18), pp 9064-9075
[0610] Bolli et al., Chem Biol. 1996 March; 3(3):197-206
[0611] DOI: 10.1021/jo402690j
[0612] Murray et al., Nucl. Acids Res., 2012, Vol. 40, No. 13 6135-6143
[0613] doi: 10.1021/acs.joc.5b00184
[0614] Nucleic Acids Res. 2004, 32, 5791-5799
[0615] WO 2011/097641 (ISIS/Ionis Pharmaceuticals)
[0616] WO2016/017422 (Osaka University)
[0617] Cao et al., Mol. Ther. Nucleic Acids, 2016, doi:10.1038/mtna.2016.46
[0618] Spitali et al., FASEB J 2013, 27(12): 4909-4916
[0619] Horiba et al., J. Org. Chem. 2016, doi: 10.1021/acs.joc.6b02036
[0620] Shrestha et al., Chem. Commun. 2014, doi: 10.1039/C3CC46017G
[0621] WO2017/062862 (WaVe Life Sciences)
[0622] WO2016/028187 (Noogen)
[0623] Jirka et al., Nucl. Acid Ther. 2014, 24, 25
[0624] WO2013/030569
[0625] U.S. Pat. No. 9,161,948 (Sarepta)
[0626] WO2016/187425 (Sarepta)
[0627] Gao et al., Mol. Ther. 2014, 22, 1333
[0628] Shabanpoor et al., Nucl. Acids Ther. 2017, 27, 130
[0629] WO2017/062862 (Wave Life Sciences)
[0630] Ferrés-Coy et al. Mol. Psych. 2016, 21, 328
[0631] U.S. Pat. No. 6,656,730 (ISIS/Ionis Pharmaceuticals)
[0632] Noir et al., J. Am. Chem Soc. 2008, 130, 13500
[0633] Nakagawa et al., J. Am. Chem. Soc. 2010, 132, 8848
[0634] Dohmen et al., Mol. Ther. Nucl. Acids 2012, 1, e7
[0635] Zhao et al. Biomaterials 2015, 67, 42
[0636] WO2016/179257 (CytoMx)
[0637] Sugo et al., J. Control. Rel. 2016, 237, 1
[0638] Weisbart et al., Mol. Cancer Ther. 2012, 11, 1
[0639] Winkler et al., Ther. Deliv. 2013, 4, 791
[0640] Manoharan, Antisense Nucl. Acid. Dev. 2004, 12, 103
[0641] Ming et al., Adv. Drug Deliv. Rev. 2015, 87, 81

1. An oligomer comprising linked monomers, wherein:
(i) a) at least one monomer has formula I: [chemical structure]
wherein:
B is a nucleobase;
X is F, —NR¹R², or —OR;
R is alkenyl or optionally substituted alkyl, where the optional substituents, when present, are halo, OR¹, NR¹R², or SR¹;
each R¹ is independently H, alkyl, cycloalkyl, aryl, heterocycloalkyl, or heteroaryl, each independently optionally further substituted with halo, hydroxy, or alkyl;
each R² is independently H or alkyl; and [chemical structure]
indicates the point of attachment to the remainder of the oligomer;
(i) b) wherein at least one monomer has formula II: [chemical structure]
wherein:
B¹ is a nucleobase;
Z—Y is a divalent group selected from —(CH₂)ₙO—, —C(CH₂CH₂)O—, —CH₂WCH₂—, —(CH₂)ₙNR³—, —CH₂S(Oₘ)—, —CH(CH₃)O—, —CH(CH₂OCH₃)O—, —CH₂N(R³)O—, —CH₂CH₂—, —C(O)NR³—, —CH═CHO—, —CH₂SO₂NR³—, and —NHC(O)NH—;
n is 1 or 2;
m is 0, 1 or 2;
W is O, S or NR³;
each R³ is independently H, —C(O)R⁴, —C(═NH)NR⁵R^{5a}, benzyl, or optionally substituted alkyl, where the optional substituents, when present, are selected from halo and alkoxy;
R⁴ is alkyl, cycloalkyl or aryl;
each R^{5a} is independently H or alkyl;
each R⁵ is independently H or alkyl; and [chemical structure]
indicates the point of attachment to the remainder of the oligomer;
(ii) only 2′-substituted monomers are linked by phosphorothioate backbone linkages and/or by phosphodiester linkages, and
(iii) a 5-methylcytosine base;
wherein said oligomer comprises 10 up to 33 linked monomer subunits.

2. An oligomer having 10 to 33 linked monomer subunits, wherein:
a) at least one monomer has formula I: [chemical structure]
wherein:
B is a nucleobase;
X is F, amino or —OR;
R is alkenyl or optionally substituted alkyl, where the optional substituents, when present, are halo, OR¹, NR¹R² or SR¹;
R¹ is H, alkyl, cycloalkyl, aryl, heterocycloalkyl or heteroaryl, each independently optionally further substituted with halo, hydroxy, or alkyl;
R² is H or alkyl; and [chemical structure]
indicates the point of attachment to the remainder of the oligomer;
b) wherein at least one monomer is a BNA having formula II: [chemical structure]
wherein:
B¹ is a nucleobase;
Z—Y is a divalent group selected from —(CH₂)ₙO—, —C(CH₂CH₂)O—, —CH₂WCH₂—, —(CH₂)ₙNR³—, —CH₂S(Oₘ)—, —CH(CH₃)O—, —CH(CH₂OCH₃)O—, —CH₂N(R³)O—, —CH₂CH₂—, —C(O)NR³, —CH═CHO—, —CH₂SO₂NR³— and —NHC(O)NH—;
n is 1 or 2;
m is 0, 1 or 2;
W is O, S or NR³;
R³ is H, —C(O)R⁴, —C(NH)NR⁵R⁵, benzyl, or optionally substituted alkyl, where the optional substituents, when present, are selected from halo and alkoxy;
R⁴ is alkyl, cycloalkyl or aryl;
R⁵ is H or alkyl; and [chemical structure]
indicates the point of attachment to the remainder of the oligonucleotide;
c) wherein the monomers are linked by phosphorothioate backbone linkages and/or by phosphodiester linkages; and
d) wherein at least one B¹ in the oligonucleotide is a 5-methylcytosine or a 5-methyluracil base.

3. The oligomer of claim 2, wherein R is unsubstituted alkyl, or CH₃, or ethyl.

4. The oligomer of claim 2, wherein R¹ is CH₃.

5. The oligomer of claim 2, wherein X is F or —OR.

6. The oligomer of claim 2, wherein X is F or —OCH₃.

7. The oligomer of claim 2, wherein Z—Y is a divalent group selected from —(CH₂)ₙO—, —CH(CH₃)O— and —CH(CH₂OCH₃)O—.

8. The oligomer of claim 2, wherein Z—Y is —CH₂O—.

9. The oligomer of claim 2, wherein the oligonucleotide comprises the sequence GGAAGAUGGCAU.

10. An oligonucleotide having a length from 10 to 33 nucleotides comprising:
i) only 2′-substituted monomers linked by phosphorothioate backbone linkages and/or by phosphodiester linkages,
ii) a 5-methylcytosine base, and
iii) at least one monomer comprising a bicyclic nucleic acid (BNA) scaffold modification,
wherein said oligonucleotide is complementary to or binds to or targets or hybridizes with at least a part of dystrophin pre-mRNA exons 2 to 78.

11. The oligomer of claim 1, wherein the oligomer comprises the sequence GGAAGAUGGCAU (SEQ ID NO: 6072).

12. The oligomer of claim 1, wherein the oligomer has a length of 16, 17, 18, 19, 20, 21, or 22 nucleotides.

13. The oligomer of claim 1, wherein the oligomer has a length of 16, 18, 20, or 22 nucleotides.

14. The oligomer of claim 1, wherein the oligomer has SEQ ID NO: 453, 455, 456, 453, 455, 456, 459, 461, 462, 465, 467, 468, 471, 473, 474, 483, 486, 525, 531, 538, 539, 540, 543, 545, 546, or 4528-4572.

15. The oligomer of claim 1, wherein the oligomer comprises the sequence GGUAAGUUCNGUCCAAGC (SEQ ID NO: 6073).

16. The oligomer of claim 1, wherein the oligomer is selected from the group consisting of SEQ ID NOs: 4561-4572.

17. The oligomer of claim 1, wherein the oligomer comprises the sequence AAGAUGGCAU (SEQ ID NO: 6085).

18. The oligomer of claim 1, wherein the oligomer is SEQ ID NO: 459.

19. The oligomer of claim 1, wherein the oligomer comprises the sequence UAAGUUCUGUCCAA (SEQ ID NO: 6086).

20. The oligomer of claim 1, wherein the oligomer is SEQ ID NO: 4565.

21. An oligonucleotide according to claim 10, wherein said oligonucleotide comprises a continuous stretch of at least 10 and up to 33 nucleotides of at least one of the nucleotide sequences selected from SEQ ID NO: 6065 to 6070, preferably of SEQ ID NO: 6067.

22. An oligonucleotide according to claim 10, wherein said oligonucleotide comprises 1, 2, 3, or 4 monomers that comprise a bicyclic nucleic acid (BNA) scaffold modification, preferably a bridged nucleic acid scaffold modification.

23. An oligonucleotide according to claim 10, wherein at least one bicyclic nucleic acid (BNA) scaffold modification is comprised in a terminal monomer of said oligonucleotide, preferably in the 5′-terminal monomer of said oligonucleotide, more preferably in both terminal monomers of said oligonucleotide.

24. An oligonucleotide according to claim 10, wherein each occurrence of said bicyclic nucleic acid (BNA) scaffold modification results in a monomer that is independently chosen from the group consisting of
a locked nucleic acid (LNA) monomer, a conformationally restrained nucleotide (CRN) monomer, a xylo-LNA monomer, an α-L-LNA monomer, a β-D-LNA monomer, a 2′-amino-LNA monomer, a 2′-(alkylamino)-LNA monomer, a 2′-(acylamino)-LNA monomer, a 2′-N-substituted-2′-amino-LNA monomer, a (2′-O,4′-C) constrained ethyl (cEt) LNA monomer, a (2′-O,4′-C) constrained methoxyethyl (cMOE) BNA monomer, a 2′,4′-BNA^{NC}(N—H) monomer, a 2′,4′-BNA^{NC}(N-Me) monomer, an ethylene-bridged nucleic acid (ENA) monomer, a 2′-C-bridged bicyclic nucleotide (CBBN) monomer, and derivatives thereof,
preferably chosen from the group consisting of an LNA monomer, an ENA monomer, a cEt BNA monomer, an oxo-CBBN monomer, a 2′-amino-LNA monomer, and a cMOE BNA monomer,
more preferably chosen from the group consisting of an LNA monomer, an ENA monomer, a cEt BNA monomer, or a cMOE BNA monomer,
most preferably the BNA scaffold modification results in an LNA monomer.

25. An oligonucleotide according to claim 10, wherein said 2′-substituted monomer is a 2′-substituted RNA monomer, a 2′-F monomer, a 2′-amino monomer, a 2′-O-substituted monomer, a 2′-O-methyl monomer, or a 2′-O-(2-methoxyethyl) monomer, preferably a 2′-O-methyl monomer.

26. An oligonucleotide according to claim 10, wherein all cytosine bases are 5-methylcytosine bases, and/or wherein all uracil bases are 5-methyluracil bases.

27. An oligonucleotide according to claim 10, wherein the length of said oligonucleotide is less than 24 nucleotides.

28. An oligonucleotide according to claim 10, wherein said oligonucleotide comprises or consists of a sequence which is complementary to or binds or targets or hybridizes at least a part of an exon recognition sequence (ERS), an exonic splicing silencer (ESS), an intronic splicing silencer (ISS), an SR protein binding site, or another splicing element, signal, or structure.

29. An oligonucleotide according to claim 10, wherein said oligonucleotide induces pre-mRNA splicing modulation, preferably said pre-mRNA splicing modulation alters production or composition of protein, which preferably comprises exon skipping or exon inclusion, wherein said RNA modulation most preferably comprises exon skipping.

30. An oligonucleotide according to claim 10, wherein said oligonucleotide has an improved parameter by comparison to a corresponding oligonucleotide that does not comprise a bicyclic nucleic acid (BNA) scaffold modification.

31. An oligonucleotide according to claim 10, wherein:
a) at least one monomer has formula I: [chemical structure]
wherein:
B is a nucleobase;
X is F, —NR¹R², or —OR;
R is alkenyl or optionally substituted alkyl, where the optional substituents, when present, are halo, OR¹, NR¹R², or SR¹;
R¹ is H, alkyl, cycloalkyl, aryl, heterocycloalkyl, or heteroaryl, each independently optionally further substituted with halo, hydroxy, or alkyl;
R² is H or alkyl; and [chemical structure]
indicates the point of attachment to the remainder of the oligonucleotide;
b) wherein at least one monomer comprises a BNA scaffold modification and has formula II: [chemical structure]
formula II
wherein:
B¹ is a nucleobase;
Z—Y is a divalent group selected from —(CH₂)ₙO—, —C(CH₂CH₂)O—, —CH₂WCH₂—, —(CH₂)ₙNR³—, —CH₂S(Oₘ)—, —CH(CH₃)O—, —CH(CH₂OCH₃)O—, —CH₂N(R³)O—, —CH₂CH₂—, —C(O)NR³—, —CH═CHO—, —CH₂SO₂NR³—, and —NHC(O)NH—;
n is 1 or 2;
m is 0, 1 or 2;
W is O, S or NR³;
R³ is H, —C(O)R⁴, —C(═NH)NR⁵R⁵, benzyl, or optionally substituted alkyl, where the optional substituents, when present, are selected from halo and alkoxy;
R⁴ is alkyl, cycloalkyl or aryl;
R⁵ is H or alkyl; and [chemical structure]
indicates the point of attachment to the remainder of the oligonucleotide.

32. A composition comprising an oligonucleotide as defined in claim 10, preferably wherein said composition comprises at least one excipient that may further aid in enhancing the targeting and/or delivery of said composition and/or said oligonucleotide to a tissue and/or cell and/or into a tissue and/or cell.

33. An oligonucleotide according to claim 10, or a composition according to claim 32 for use as a medicament, preferably for treating, preventing, and/or delaying Duchenne Muscular Dystrophy (DMD).

34. A method for preventing, treating, and/or delaying Duchenne Muscular Dystrophy (DMD), comprising administering to a subject an oligonucleotide as defined in claim 10, or a composition as defined in claim 32.

The application's sequence listing, which the Patent Office published only in electronic form, follows.

SEQUENCE LISTING (6092 sequences)

SEQ ID NO: 1 - protein, 3685 aa, Homo sapiens
MLWWEEVEDCYEREDVQKKTFTKWVNAQFSKFGKQHIENLFSDLQDGRRLLDLLEGLTGQKLPKEKGSTRVHALNNVNKALRVLQNNNVDLVNIGSTDIVDGNHKLTLGLIWNIILHWQVKNVMKNIMAGLQQTNSEKILLSWVRQSTRNYPQVNVINFTTSWSDGLALNALIHSHRPDLFDWNSVVCQQSATQRLEHAFNIARYQLGIEKLLDPEDVDTTYPDKKSILMYITSLFQVLPQQVSIEAIQEVEMLPRPPKVTKEEHFQLHHQMHYSQQITVSLAQGYERTSSPKPRFKSYAYTQAAYVTTSDPTRSPFPSQHLEAPEDKSFGSSLMESEVNLDRYQTALEEVLSWLLSAEDTLQAQGEISNDVEVVKDQFHTHEGYMMDLTAHQGRVGNILQLGSKLIGTGKLSEDEETEVQEQMNLLNSRWECLRVASMEKQSNLHRVLMDLQNQKLKELNDWLTKTEERTRKMEEEPLGPDLEDLKRQVQQHKVLQEDLEQEQVRVNSLTHMVVVVDESSGDHATAALEEQLKVLGDRWANICRWTEDRWVLLQDILLKWQRLTEEQCLFSAWLSEKEDAVNKIHTTGFKDQNEMLSSLQKLAVLKADLEKKKQSMGKLYSLKQDLLSTLKNKSVTQKTEAWLDNFARCWDNLVQKLEKSTAQISQAVTTTQPSLTQTTVMETVTTVTTREQILVKHAQEELPPPPPQKKRQITVDSEIRKRLDVDITELHSWITRSEAVLQSPEFAIFRKEGNFSDLKEKVNAIEREKAEKFRKLQDASRSAQALVEQMVNEGVNADSIKQASEQLNSRWIEFCQLLSERLNWLEYQNNIIAFYNQLQQLEQMTTTAENWLKIQPTTPSEPTAIKSQLKICKDEVNRLSGLQPQIERLKIQSIALKEKGQGPMFLDADFVAFTNHFKQVFSDVQAREKELQTIFDTLPPMRYQETMSAIRTWVQQSETKLSIPQLSVTDYEIMEQRLGELQALQSSLQEQQSGLYYLSTTVKEMSKKAPSEISRKYQSEFEEIEGRWKKLSSQLVEHCQKLEEQMNKLRKIQNHIQTLKKWMAEVDVFLKEEWPALGDSEILKKQLKQCRLLVSDIQTIQPSLNSVNEGGQKIKNEAEPEFASRLETELKELNTQWDHMCQQVYARKEALKGGLEKTVSLQKDLSEMHEWMTQAEEEYLERDFEYKTPDELQKAVEEMKRAKEEAQQKEAKVKLLTESVNSVIAQAPPVAQEALKKELETLTTNYQWLCTRLNGKCKTLEEVWACWHELLSYLEKANKWLNEVEFKLKTTENIPGGAEEISEVLDSLENLMRHSEDNPNQIRILAQTLTDGGVMDELINEELETFNSRWRELHEEAVRRQKLLEQSIQSAQETEKSLHLIQESLTFIDKQLAAYIADKVDAAQMPQEAQKIQSDLTSHEISLEEMKKHNQGKEAAQRVLSQIDVAQKKLQDVSMKFRLFQKPANFEQRLQESKMILDEVKMHLPALETKSVEQEVVQSQLNHCVNLYKSLSEVKSEVEMVIKTGRQIVQKKQTENPKELDERVTALKLHYNELGAKVTERKQQLEKCLKLSRKMRKEMNVLTEWLAATDMELTKRSAVEGMPSNLDSEVAWGKATQKEIEKQKVHLKSITEVGEALKTVLGKKETLVEDKLSLLNSNWIAVTSRAEEWLNLLLEYQKHMETFDQNVDHITKWIIQADTLLDESEKKKPQQKEDVLKRLKAELNDIRPKVDSTRDQAANLMANRGDHCRKLVEPQISELNHRFAAISHRIKTGKASIPLKELEQFNSDIQKLLEPLEAEIQQGVNLKEEDFNKDMNEDNEGTVKELLQRGDNLQQRITDERKREEIKIKQQLLQTKHNALKDLRSQRRKKALEISHQWYQYKRQADDLLKCLDDIEKKLASLPEPRDERKIKEIDRELQKKKEELNAVRRQAEGLSEDGAAMAVEPTQIQLSKRWREIESKFAQFRRLNFAQIHTVREETMMVMTEDMPLEISYVPSTYLTEITHVSQALLEVEQLLNAPDLCAKDFEDLFKQEESLKNIKDSLQQSSGRIDIIHSKKTAALQSATPVERVKLQEALSQLDFQWEKVNKMYKDRQGRFDRSVEKWRRFHYDIKIFNQWLTEAEQFLRKTQIPENWEHAKYKWYLKELQDGIGQRQTVVRTLNATGEEIIQQSSKTDASILQEKLGSLNLRWQEVCKQLSDRKKRLEEQKNILSEFQRDLNEFVLWLEEADNIASIPLEPGKEQQLKEKLEQVKLLVEELPLRQGILKQLNETGGPVLVSAPISPEEQDKLENKLKQTNLQWIKVSRALPEKQGEIEAQIKDLGQLEKKLEDLEEQLNHLLLWLSPIRNQLEIYNQPNQEGPFDVQETEIAVQAKQPDVEEILSKGQHLYKEKPATQPVKRKLEDLSSEWKAVNRLLQELRAKQPDLAPGLTTIGASPTQTVTLVTQPVVTKETAISKLEMPSSLMLEVPALADFNRAWTELTDWLSLLDQVIKSQRVMVGDLEDINEMIIKQKATMQDLEQRRPQLEELITAAQNLKNKTSNQEARTIITDRIERIQNQWDEVQEHLQNRRQQLNEMLKDSTQWLEAKEEAEQVLGQARAKLESWKEGPYTVDAIQKKITETKQLAKDLRQWQTNVDVANDLALKLLRDYSADDTRKVHMITENINASWRSIHKRVSEREAALEETHRLLQQFPLDLEKFLAWLTEAETTANVLQDATRKERLLEDSKGVKELMKQWQDLQGEIEAHTDVYHNLDENSQKILRSLEGSDDAVLLQRRLDNMNFKWSELRKKSLNIRSHLEASSDQWKRLHLSLQELLVWLQLKDDELSRQAPIGGDFPAVQKQNDVHRAFKRELKTKEPVIMSTLETVRIFLTEQPLEGLEKLYQEPRELPPEERAQNVTRLLRKQAEEVNTEWEKLNLHSADWQRKIDETLERLQELQEATDELDLKLRQAEVIKGSWQPVGDLLIDSLQDHLEKVKALRGEIAPLKENVSHVNDLARQLTTLGIQLSPYNLSTLEDLNTRWKLLQVAVEDRVRQLHEAHRDFGPASQHFLSTSVQGPWERAISPNKVPYYINHETQTTCWDHPKMTELYQSLADLNNVRFSAYRTAMKLRRLQKALCLDLLSLSAACDALDQHNLKQNDQPMDILQIINCLTTIYDRLEQEHNNLVNVPLCVDMCLNWLLNVYDTGRTGRIRVLSFKTGIISLCKAHLEDKYRYLFKQVASSTGFCDQRRLGLLLHDSIQIPRQLGEVASFGGSNIEPSVRSCFQFANNKPEIEAALFLDWMRLEPQSMVWLPVLHRVAAAETAKHQAKCNICKECPIIGFRYRSLKHFNYDICQSCFFSGRVAKGHKMHYPMVEYCTPTTSGEDVRDFAKVLKNKFRTKRYFAKHPRMGYLPVQTVLEGDNMETPVTLINFWPVDSAPASSPQLSHDDTHSRIEHYASRLAEMENSNGSYLNDSISPNESIDDEHLLIQHYCQSLNQDSPLSQPRSPAQILISLESEERGELERILADLEEENRNLQAEYDRLKQQHEHKGLSPLPSPPEMMPTSPQSPRDAELIAEAKLLRQHKGRLEARMQILEDHNKQLESQLHRLRQLLEQPQAEAKVNGTTVSSPSTSLQRSDSSQPMLLRVVGSQTSDSMGEEDLLSPPQDTSTGLEEVMEQLNNSFPSSRGRNTPGKPMREDTM

SEQ ID NO: 2 - RNA, 148 nt, Artificial Sequence
  DMD exon 44
gcgauuugacagaucuguugagaaauggcggcguuuucauuaugauauaaagauauuuaaucaguggcuaacagaagcugaacaguuucucagaaagacacaaauuccugagaauugggaacaugcuaaauacaaaugguaucuuaag

SEQ ID NO: 3 - RNA, 176 nt, Artificial Sequence
  DMD exon 45
gaacuccaggauggcauugggcagcggcaaacuguugucagaacauugaaugcaacuggggaagaaauaauucagcaauccucaaaaacagaugccaguauucuacaggaaaaauugggaagccugaaucugcgguggcaggaggucugcaaacagcugucagacagaaaaaagag

SEQ ID NO: 4 - RNA, 233 nt, Artificial Sequence
  DMD exon 51
cuccuacucagacuguuacucuggugacacaaccugugguuacuaaggaaacugccaucuccaaacuagaaaugccaucuuccuugauguuggagguaccugcucuggcagauuucaaccgggcuuggacagaacuuaccgacuggcuuucucugcuugaucaaguuauaaaaucacagagggugauggugggugaccuugaggauaucaacgagaugaucaucaagcagaag

SEQ ID NO: 5 - RNA, 118 nt, Artificial Sequence
  DMD exon 52
gcaacaaugcaggauuuggaacagaggcguccccaguuggaagaacucauuaccgcugcccaaaauuugaaaaacaagaccagcaaucaagaggcuagaacaaucauuacggaucgaa

SEQ ID NO: 6 - RNA, 212 nt, Artificial Sequence
  DMD exon 53
uugaaagaauucagaaucagugggaugaaguacaagaacaccuucagaaccggaggcaacaguugaaugaaauguuaaaggauucaacacaauggcuggaagcuaaggaagaagcugagcaggucuuaggacaggccagagccaagcuugagucauggaaggagggucccuauacaguagaugcaauccaaaagaaaaucacagaaaccaag

SEQ ID NO: 7 - RNA, 190 nt, Artificial Sequence
  DMD exon 55
ggugagugagcgagaggcugcuuuggaagaaacucauagauuacugcaacaguucccccuggaccuggaaaaguuucuugccuggcuuacagaagcugaaacaacugccaauguccuacaggaugcuacccguaaggaaaggcuccuagaagacuccaagggaguaaaagagcugaugaaacaauggcaa

SEQ ID NO: 8 - RNA, 19 nt, Artificial Sequence
  Antisense oligonucleotide
gccauuucucaacagaucu

SEQ ID NO: 9 - RNA, 19 nt, Artificial Sequence
  Antisense oligonucleotide
  misc_feature (1)..(1): BNA scaffold modification
gccauuucucaacagaucu

SEQ ID NO: 10 - RNA, 19 nt, Artificial Sequence
  Antisense oligonucleotide
  misc_feature (19)..(19): BNA scaffold modification
gccauuucucaacagauct

SEQ ID NO: 11 - RNA, 19 nt, Artificial Sequence
  Antisense oligonucleotide
  misc_feature (1)..(1): BNA scaffold modification
  misc_feature (19)..(19): BNA scaffold modification
gccauuucucaacagauct

SEQ ID NO: 12 - RNA, 19 nt, Artificial Sequence
  Antisense oligonucleotide
  misc_feature (1)..(2): BNA scaffold modification
gccauuucucaacagaucu

SEQ ID NO: 13 - RNA, 19 nt, Artificial Sequence
  Antisense oligonucleotide
  misc_feature (18)..(19): BNA scaffold modification
gccauuucucaacagauct

SEQ ID NO: 14 - RNA, 16 nt, Artificial Sequence
  Antisense oligonucleotide
gccauuucucaacaga

SEQ ID NO: 15 - RNA, 16 nt, Artificial Sequence
  Antisense oligonucleotide
  misc_feature (1)..(1): BNA scaffold modification
gccauuucucaacaga

SEQ ID NO: 16 - RNA, 16 nt, Artificial Sequence
  Antisense oligonucleotide
  misc_feature (16)..(16): BNA scaffold modification
gccauuucucaacaga

SEQ ID NO: 17 - RNA, 16 nt, Artificial Sequence
  Antisense oligonucleotide
  misc_feature (1)..(1): BNA scaffold modification
  misc_feature (16)..(16): BNA scaffold modification
gccauuucucaacaga

SEQ ID NO: 18 - RNA, 16 nt, Artificial Sequence
  Antisense oligonucleotide
  misc_feature (1)..(2): BNA scaffold modification
gccauuucucaacaga

SEQ ID NO: 19 - RNA, 16 nt, Artificial Sequence
  Antisense oligonucleotide
  misc_feature (15)..(16): BNA scaffold modification
gccauuucucaacaga

SEQ ID NO: 20 - RNA, 21 nt, Artificial Sequence
  Antisense oligonucleotide
gccauuucucaacagaucugu

SEQ ID NO: 21 - RNA, 21 nt, Artificial Sequence
  Antisense oligonucleotide
  misc_feature (1)..(1): BNA scaffold modification
gccauuucucaacagaucugu

SEQ ID NO: 22 - RNA, 21 nt, Artificial Sequence
  Antisense oligonucleotide
  misc_feature (21)..(21): BNA scaffold modification
gccauuucucaacagaucugt

SEQ ID NO: 23 - RNA, 21 nt, Artificial Sequence
  Antisense oligonucleotide
  misc_feature (1)..(1): BNA scaffold modification
  misc_feature (21)..(21): BNA scaffold modification
gccauuucucaacagaucugt

SEQ ID NO: 24 - RNA, 21 nt, Artificial Sequence
  Antisense oligonucleotide
  misc_feature (1)..(2): BNA scaffold modification
gccauuucucaacagaucugu

SEQ ID NO: 25 - RNA, 21 nt, Artificial Sequence
  Antisense oligonucleotide
  misc_feature (20)..(21): BNA scaffold modification
gccauuucucaacagaucugt

SEQ ID NO: 26 - RNA, 20 nt, Artificial Sequence
  Antisense oligonucleotide
ucagcuucuguuagccacug

SEQ ID NO: 27 - RNA, 20 nt, Artificial Sequence
  Antisense oligonucleotide
  misc_feature (1)..(1): BNA scaffold modification
tcagcuucuguuagccacug

SEQ ID NO: 28 - RNA, 20 nt, Artificial Sequence
  Antisense oligonucleotide
  misc_feature (20)..(20): BNA scaffold modification
ucagcuucuguuagccacug

SEQ ID NO: 29 - RNA, 20 nt, Artificial Sequence
  Antisense oligonucleotide
  misc_feature (1)..(1): BNA scaffold modification
  misc_feature (20)..(20): BNA scaffold modification
tcagcuucuguuagccacug

SEQ ID NO: 30 - RNA, 20 nt, Artificial Sequence
  Antisense oligonucleotide
  misc_feature (1)..(2): BNA scaffold modification
tcagcuucuguuagccacug

SEQ ID NO: 31 - RNA, 20 nt, Artificial Sequence
  Antisense oligonucleotide
  misc_feature (19)..(20): BNA scaffold modification
ucagcuucuguuagccactg

SEQ ID NO: 32 - RNA, 16 nt, Artificial Sequence
  Antisense oligonucleotide
ucagcuucuguuagcc

SEQ ID NO: 33 - RNA, 16 nt, Artificial Sequence
  Antisense oligonucleotide
  misc_feature (1)..(1): BNA scaffold modification
tcagcuucuguuagcc

SEQ ID NO: 34 - RNA, 16 nt, Artificial Sequence
  Antisense oligonucleotide
  misc_feature (16)..(16): BNA scaffold modification
ucagcuucuguuagcc

SEQ ID NO: 35 - RNA, 16 nt, Artificial Sequence
  Antisense oligonucleotide
  misc_feature (1)..(1): BNA scaffold modification
  misc_feature (16)..(16): BNA scaffold modification
tcagcuucuguuagcc

SEQ ID NO: 36 - RNA, 16 nt, Artificial Sequence
  Antisense oligonucleotide
  misc_feature (1)..(2): BNA scaffold modification
tcagcuucuguuagcc

SEQ ID NO: 37 - RNA, 16 nt, Artificial Sequence
  Antisense oligonucleotide
  misc_feature (15)..(16): BNA scaffold modification
ucagcuucuguuagcc

SEQ ID NO: 38 - RNA, 18 nt, Artificial Sequence
  Antisense oligonucleotide
ucagcuucuguuagccac

SEQ ID NO: 39 - RNA, 18 nt, Artificial Sequence
  Antisense oligonucleotide
  misc_feature (1)..(1): BNA scaffold modification
tcagcuucuguuagccac

SEQ ID NO: 40 - RNA, 18 nt, Artificial Sequence
  Antisense oligonucleotide
  misc_feature (18)..(18): BNA scaffold modification
ucagcuucuguuagccac

SEQ ID NO: 41 - RNA, 18 nt, Artificial Sequence
  Antisense oligonucleotide
  misc_feature (1)..(1): BNA scaffold modification
  misc_feature (18)..(18): BNA scaffold modification
tcagcuucuguuagccac

SEQ ID NO: 42 - RNA, 18 nt, Artificial Sequence
  Antisense oligonucleotide
  misc_feature (1)..(2): BNA scaffold modification
tcagcuucuguuagccac

SEQ ID NO: 43 - RNA, 18 nt, Artificial Sequence
  Antisense oligonucleotide
  misc_feature (17)..(18): BNA scaffold modification
ucagcuucuguuagccac

SEQ ID NO: 44 - RNA, 16 nt, Artificial Sequence
  Antisense oligonucleotide
cuucuguuagccacug

SEQ ID NO: 45 - RNA, 16 nt, Artificial Sequence
  Antisense oligonucleotide
  misc_feature (1)..(1): BNA scaffold modification
cuucuguuagccacug

SEQ ID NO: 46 - RNA, 16 nt, Artificial Sequence
  Antisense oligonucleotide
  misc_feature (16)..(16): BNA scaffold modification
cuucuguuagccacug

SEQ ID NO: 47 - RNA, 16 nt, Artificial Sequence
  Antisense oligonucleotide
  misc_feature (1)..(1): BNA scaffold modification
  misc_feature (16)..(16): BNA scaffold modification
cuucuguuagccacug

SEQ ID NO: 48 - RNA, 16 nt, Artificial Sequence
  Antisense oligonucleotide
  misc_feature (1)..(2): BNA scaffold modification
ctucuguuagccacug

SEQ ID NO: 49 - RNA, 16 nt, Artificial Sequence
  Antisense oligonucleotide
  misc_feature (15)..(16): BNA scaffold modification
cuucuguuagccactg

SEQ ID NO: 50 - RNA, 18 nt, Artificial Sequence
  Antisense oligonucleotide
agcuucuguuagccacug

SEQ ID NO: 51 - RNA, 18 nt, Artificial Sequence
  Antisense oligonucleotide
  misc_feature (1)..(1): BNA scaffold modification
agcuucuguuagccacug

SEQ ID NO: 52 - RNA, 18 nt, Artificial Sequence
  Antisense oligonucleotide
  misc_feature (18)..(18): BNA scaffold modification
agcuucuguuagccacug

SEQ ID NO: 53 - RNA, 18 nt, Artificial Sequence
  Antisense oligonucleotide
  misc_feature (1)..(1): BNA scaffold modification
  misc_feature (18)..(18): BNA scaffold modification
agcuucuguuagccacug

SEQ ID NO: 54 - RNA, 18 nt, Artificial Sequence
  Antisense oligonucleotide
  misc_feature (1)..(2): BNA scaffold modification
agcuucuguuagccacug

SEQ ID NO: 55 - RNA, 18 nt, Artificial Sequence
  Antisense oligonucleotide
  misc_feature (17)..(18): BNA scaffold modification
agcuucuguuagccactg

SEQ ID NO: 56 - RNA, 22 nt, Artificial Sequence
  Antisense oligonucleotide
ucagcuucuguuagccacugau

SEQ ID NO: 57 - RNA, 22 nt, Artificial Sequence
  Antisense oligonucleotide
  misc_feature (1)..(1): BNA scaffold modification
tcagcuucuguuagccacugau

SEQ ID NO: 58 - RNA, 22 nt, Artificial Sequence
  Antisense oligonucleotide
  misc_feature (22)..(22): BNA scaffold modification
ucagcuucuguuagccacugat

SEQ ID NO: 59 - RNA, 22 nt, Artificial Sequence
  Antisense oligonucleotide
  misc_feature (1)..(1): BNA scaffold modification
  misc_feature (22)..(22): BNA scaffold modification
tcagcuucuguuagccacugat

SEQ ID NO: 60 - RNA, 22 nt, Artificial Sequence
  Antisense oligonucleotide
  misc_feature (1)..(2): BNA scaffold modification
tcagcuucuguuagccacugau

SEQ ID NO: 61 - RNA, 22 nt, Artificial Sequence
  Antisense oligonucleotide
  misc_feature (21)..(22): BNA scaffold modification
ucagcuucuguuagccacugat

SEQ ID NO: 62 - RNA, 22 nt, Artificial Sequence
  Antisense oligonucleotide
guucagcuucuguuagccacug

SEQ ID NO: 63 - RNA, 22 nt, Artificial Sequence
  Antisense oligonucleotide
  misc_feature (1)..(1): BNA scaffold modification
guucagcuucuguuagccacug

SEQ ID NO: 64 - RNA, 22 nt, Artificial Sequence
  Antisense oligonucleotide
  misc_feature (22)..(22): BNA scaffold modification
guucagcuucuguuagccacug

SEQ ID NO: 65 - RNA, 22 nt, Artificial Sequence
  Antisense oligonucleotide
  misc_feature (1)..(1): BNA scaffold modification
  misc_feature (22)..(22): BNA scaffold modification
guucagcuucuguuagccacug

SEQ ID NO: 66 - RNA, 22 nt, Artificial Sequence
  Antisense oligonucleotide
  misc_feature (1)..(2): BNA scaffold modification
gtucagcuucuguuagccacug

SEQ ID NO: 67 - RNA, 22 nt, Artificial Sequence
  Antisense oligonucleotide
  misc_feature (21)..(22): BNA scaffold modification
guucagcuucuguuagccactg

SEQ ID NO: 68 - RNA, 16 nt, Artificial Sequence
  Antisense oligonucleotide
agcuucuguuagccac

SEQ ID NO: 69 - RNA, 16 nt, Artificial Sequence
  Antisense oligonucleotide
  misc_feature (1)..(1): BNA scaffold modification
agcuucuguuagccac

SEQ ID NO: 70 - RNA, 16 nt, Artificial Sequence
  Antisense oligonucleotide
  misc_feature (16)..(16): BNA scaffold modification
agcuucuguuagccac

SEQ ID NO: 71 - RNA, 16 nt, Artificial Sequence
  Antisense oligonucleotide
  misc_feature (1)..(1): BNA scaffold modification
  misc_feature (16)..(16): BNA scaffold modification
agcuucuguuagccac

SEQ ID NO: 72 - RNA, 16 nt, Artificial Sequence
  Antisense oligonucleotide
  misc_feature (1)..(2): BNA scaffold modification
agcuucuguuagccac

SEQ ID NO: 73 - RNA, 16 nt, Artificial Sequence
  Antisense oligonucleotide
  misc_feature (15)..(16): BNA scaffold modification
agcuucuguuagccac

SEQ ID NO: 74 - RNA, 20 nt, Artificial Sequence
  Antisense oligonucleotide
uuuguauuuagcauguuccc

SEQ ID NO: 75 - RNA, 20 nt, Artificial Sequence
  Antisense oligonucleotide
  misc_feature (1)..(1): BNA scaffold modification
tuuguauuuagcauguuccc

SEQ ID NO: 76 - RNA, 20 nt, Artificial Sequence
  Antisense oligonucleotide
  misc_feature (20)..(20): BNA scaffold modification
uuuguauuuagcauguuccc

SEQ ID NO: 77 - RNA, 20 nt, Artificial Sequence
  Antisense oligonucleotide
  misc_feature (1)..(1): BNA scaffold modification
  misc_feature (20)..(20): BNA scaffold modification
tuuguauuuagcauguuccc

SEQ ID NO: 78 - RNA, 20 nt, Artificial Sequence
  Antisense oligonucleotide
  misc_feature (1)..(2): BNA scaffold modification
ttuguauuuagcauguuccc

SEQ ID NO: 79 - RNA, 20 nt, Artificial Sequence
  Antisense oligonucleotide
  misc_feature (19)..(20): BNA scaffold modification
uuuguauuuagcauguuccc

SEQ ID NO: 80 - RNA, 18 nt, Artificial Sequence
  Antisense oligonucleotide
uuuguauuuagcauguuc

SEQ ID NO: 81 - RNA, 18 nt, Artificial Sequence
  Antisense oligonucleotide
  misc_feature (1)..(1): BNA scaffold modification
tuuguauuuagcauguuc

SEQ ID NO: 82 - RNA, 18 nt, Artificial Sequence
  Antisense oligonucleotide
  misc_feature (18)..(18): BNA scaffold modification
uuuguauuuagcauguuc

SEQ ID NO: 83 - RNA, 18 nt, Artificial Sequence
  Antisense oligonucleotide
  misc_feature (1)..(1): BNA scaffold modification
  misc_feature (18)..(18): BNA scaffold modification
tuuguauuuagcauguuc

SEQ ID NO: 84 - RNA, 18 nt, Artificial Sequence
  Antisense oligonucleotide
  misc_feature (1)..(2): BNA scaffold modification
ttuguauuuagcauguuc

SEQ ID NO: 85 - RNA, 18 nt, Artificial Sequence
  Antisense oligonucleotide
  misc_feature (17)..(18): BNA scaffold modification
uuuguauuuagcaugutc

SEQ ID NO: 86 - RNA, 16 nt, Artificial Sequence
  Antisense oligonucleotide
uuuguauuuagcaugu

SEQ ID NO: 87 - RNA, 16 nt, Artificial Sequence
  Antisense oligonucleotide
  misc_feature (1)..(1): BNA scaffold modification
tuuguauuuagcaugu

SEQ ID NO: 88 - RNA, 16 nt, Artificial Sequence
  Antisense oligonucleotide
  misc_feature (16)..(16): BNA scaffold modification
uuuguauuuagcaugt

SEQ ID NO: 89 - RNA, 16 nt, Artificial Sequence
  Antisense oligonucleotide
  misc_feature (1)..(1): BNA scaffold modification
  misc_feature (16)..(16): BNA scaffold modification
tuuguauuuagcaugt

SEQ ID NO: 90 - RNA, 16 nt, Artificial Sequence
  Antisense oligonucleotide
  misc_feature (1)..(2): BNA scaffold modification
ttuguauuuagcaugu

SEQ ID NO: 91 - RNA, 16 nt, Artificial Sequence
  Antisense oligonucleotide
  misc_feature (15)..(16): BNA scaffold modification
uuuguauuuagcaugt

SEQ ID NO: 92 - RNA, 18 nt, Artificial Sequence
  Antisense oligonucleotide
uguauuuagcauguuccc

SEQ ID NO: 93 - RNA, 18 nt, Artificial Sequence
  Antisense oligonucleotide
  misc_feature (1)..(1): BNA scaffold modification
tguauuuagcauguuccc

SEQ ID NO: 94 - RNA, 18 nt, Artificial Sequence
  Antisense oligonucleotide
  misc_feature (18)..(18): BNA scaffold modification
uguauuuagcauguuccc

SEQ ID NO: 95 - RNA, 18 nt, Artificial Sequence
  Antisense oligonucleotide
  misc_feature (1)..(1): BNA scaffold modification
  misc_feature (18)..(18): BNA scaffold modification
tguauuuagcauguuccc

SEQ ID NO: 96 - RNA, 18 nt, Artificial Sequence
  Antisense oligonucleotide
  misc_feature (1)..(2): BNA scaffold modification
tguauuuagcauguuccc

SEQ ID NO: 97 - RNA, 18 nt, Artificial Sequence
  Antisense oligonucleotide
  misc_feature (17)..(18): BNA scaffold modification
uguauuuagcauguuccc

SEQ ID NO: 98 - RNA, 16 nt, Artificial Sequence
  Antisense oligonucleotide
uauuuagcauguuccc

SEQ ID NO: 99 - RNA, 16 nt, Artificial Sequence
  Antisense oligonucleotide
  misc_feature (1)..(1): BNA scaffold modification
tauuuagcauguuccc

SEQ ID NO: 100 - RNA, 16 nt, Artificial Sequence
  Antisense oligonucleotide
  misc_feature (16)..(16): BNA scaffold modification
uauuuagcauguuccc

SEQ ID NO: 101 - RNA, 16 nt, Artificial Sequence
  Antisense oligonucleotide
  misc_feature (1)..(1): BNA scaffold modification
  misc_feature (16)..(16): BNA scaffold modification
tauuuagcauguuccc

SEQ ID NO: 102 - RNA, 16 nt, Artificial Sequence
  Antisense oligonucleotide
  misc_feature (1)..(2): BNA scaffold modification
tauuuagcauguuccc

SEQ ID NO: 103 - RNA, 16 nt, Artificial Sequence
  Antisense oligonucleotide
  misc_feature (15)..(16): BNA scaffold modification
uauuuagcauguuccc

SEQ ID NO: 104 - RNA, 22 nt, Artificial Sequence
  Antisense oligonucleotide
uuuguauuuagcauguucccaa

SEQ ID NO: 105 - RNA, 22 nt, Artificial Sequence
  Antisense oligonucleotide
  misc_feature (1)..(1): BNA scaffold modification
tuuguauuuagcauguucccaa

SEQ ID NO: 106 - RNA, 22 nt, Artificial Sequence
  Antisense oligonucleotide
  misc_feature (22)..(22): BNA scaffold modification
uuuguauuuagcauguucccaa

SEQ ID NO: 107 - RNA, 22 nt, Artificial Sequence
  Antisense oligonucleotide
  misc_feature (1)..(1): BNA scaffold modification
  misc_feature (22)..(22): BNA scaffold modification
tuuguauuuagcauguucccaa

SEQ ID NO: 108 - RNA, 22 nt, Artificial Sequence
  Antisense oligonucleotide
  misc_feature (1)..(2): BNA scaffold modification
ttuguauuuagcauguucccaa

SEQ ID NO: 109 - RNA, 22 nt, Artificial Sequence
  Antisense oligonucleotide
  misc_feature (21)..(22): BNA scaffold modification
uuuguauuuagcauguucccaa

SEQ ID NO: 110 - RNA, 22 nt, Artificial Sequence
  Antisense oligonucleotide
cauuuguauuuagcauguuccc

SEQ ID NO: 111 - RNA, 22 nt, Artificial Sequence
  Antisense oligonucleotide
  misc_feature (1)..(1): BNA scaffold modification
cauuuguauuuagcauguuccc

SEQ ID NO: 112 - RNA, 22 nt, Artificial Sequence
  Antisense oligonucleotide
  misc_feature (22)..(22): BNA scaffold modification
cauuuguauuuagcauguuccc

SEQ ID NO: 113 - RNA, 22 nt, Artificial Sequence
  Antisense oligonucleotide
  misc_feature (1)..(1): BNA scaffold modification
  misc_feature (22)..(22): BNA scaffold modification
cauuuguauuuagcauguuccc

SEQ ID NO: 114 - RNA, 22 nt, Artificial Sequence
  Antisense oligonucleotide
  misc_feature (1)..(2): BNA scaffold modification
cauuuguauuuagcauguuccc

SEQ ID NO: 115 - RNA, 22 nt, Artificial Sequence
  Antisense oligonucleotide
  misc_feature (21)..(22): BNA scaffold modification
cauuuguauuuagcauguuccc

SEQ ID NO: 116 - RNA, 23 nt, Artificial Sequence
  Antisense oligonucleotide
auucucaggaauuugugucuuuc

SEQ ID NO: 117 - RNA, 23 nt, Artificial Sequence
  Antisense oligonucleotide
  misc_feature (1)..(1): BNA scaffold modification
auucucaggaauuugugucuuuc

SEQ ID NO: 118 - RNA, 23 nt, Artificial Sequence
  Antisense oligonucleotide
  misc_feature (23)..(23): BNA scaffold modification
auucucaggaauuugugucuuuc

SEQ ID NO: 119 - RNA, 23 nt, Artificial Sequence
  Antisense oligonucleotide
  misc_feature (1)..(1): BNA scaffold modification
  misc_feature (23)..(23): BNA scaffold modification
auucucaggaauuugugucuuuc

SEQ ID NO: 120 - RNA, 23 nt, Artificial Sequence
  Antisense oligonucleotide
  misc_feature (1)..(2): BNA scaffold modification
atucucaggaauuugugucuuuc

SEQ ID NO: 121 - RNA, 23 nt, Artificial Sequence
  Antisense oligonucleotide
  misc_feature (22)..(23): BNA scaffold modification
auucucaggaauuugugucuutc

SEQ ID NO: 122 - RNA, 20 nt, Artificial Sequence
  Antisense oligonucleotide
auucucaggaauuugugucu

SEQ ID NO: 123 - RNA, 20 nt, Artificial Sequence
  Antisense oligonucleotide
  misc_feature (1)..(1): BNA scaffold modification
auucucaggaauuugugucu

SEQ ID NO: 124 - RNA, 20 nt, Artificial Sequence
  Antisense oligonucleotide
  misc_feature (20)..(20): BNA scaffold modification
auucucaggaauuuguguct

SEQ ID NO: 125 - RNA, 20 nt, Artificial Sequence
  Antisense oligonucleotide
  misc_feature (1)..(1): BNA scaffold modification
  misc_feature (20)..(20): BNA scaffold modification
auucucaggaauuuguguct

SEQ ID NO: 126 - RNA, 20 nt, Artificial Sequence
  Antisense oligonucleotide
  misc_feature (1)..(2): BNA scaffold modification
atucucaggaauuugugucu

SEQ ID NO: 127 - RNA, 20 nt, Artificial Sequence
  Antisense oligonucleotide
  misc_feature (19)..(20): BNA scaffold modification
auucucaggaauuuguguct

SEQ ID NO: 128 - RNA, 18 nt, Artificial Sequence
  Antisense oligonucleotide
auucucaggaauuugugu

SEQ ID NO: 129 - RNA, 18 nt, Artificial Sequence
  Antisense oligonucleotide
  misc_feature (1)..(1): BNA scaffold modification
auucucaggaauuugugu

SEQ ID NO: 130 - RNA, 18 nt, Artificial Sequence
  Antisense oligonucleotide
  misc_feature (18)..(18): BNA scaffold modification
auucucaggaauuugugt

SEQ ID NO: 131 - RNA, 18 nt, Artificial Sequence
  Antisense oligonucleotide
  misc_feature (1)..(1): BNA scaffold modification
  misc_feature (18)..(18): BNA scaffold modification
auucucaggaauuugugt

SEQ ID NO: 132 - RNA, 18 nt, Artificial Sequence
  Antisense oligonucleotide
  misc_feature (1)..(2): BNA scaffold modification
atucucaggaauuugugu

SEQ ID NO: 133 - RNA, 18 nt, Artificial Sequence
  Antisense oligonucleotide
  misc_feature (17)..(18): BNA scaffold modification
auucucaggaauuugugt

SEQ ID NO: 134 - RNA, 16 nt, Artificial Sequence
  Antisense oligonucleotide
auucucaggaauuugu

SEQ ID NO: 135 - RNA, 16 nt, Artificial Sequence
  Antisense oligonucleotide
  misc_feature (1)..(1): BNA scaffold modification
auucucaggaauuugu

SEQ ID NO: 136 - RNA, 16 nt, Artificial Sequence
  Antisense oligonucleotide
  misc_feature (16)..(16): BNA scaffold modification
auucucaggaauuugt

SEQ ID NO: 137 - RNA, 16 nt, Artificial Sequence
  Antisense oligonucleotide
  misc_feature (1)..(1): BNA scaffold modification
  misc_feature (16)..(16): BNA scaffold modification
auucucaggaauuugt

SEQ ID NO: 138 - RNA, 16 nt, Artificial Sequence
  Antisense oligonucleotide
  misc_feature (1)..(2): BNA scaffold modification
atucucaggaauuugu

SEQ ID NO: 139 - RNA, 16 nt, Artificial Sequence
  Antisense oligonucleotide
  misc_feature (15)..(16): BNA scaffold modification
auucucaggaauuugt

SEQ ID NO: 140 - RNA, 20 nt, Artificial Sequence
  Antisense oligonucleotide
cucaggaauuugugucuuuc

SEQ ID NO: 141 - RNA, 20 nt, Artificial Sequence
  Antisense oligonucleotide
  misc_feature (1)..(1): BNA scaffold modification
cucaggaauuugugucuuuc

SEQ ID NO: 142 - RNA, 20 nt, Artificial Sequence
  Antisense oligonucleotide
  misc_feature (20)..(20): BNA scaffold modification
cucaggaauuugugucuuuc

SEQ ID NO: 143 - RNA, 20 nt, Artificial Sequence
  Antisense oligonucleotide
  misc_feature (1)..(1): BNA scaffold modification
  misc_feature (20)..(20): BNA scaffold modification
cucaggaauuugugucuuuc

SEQ ID NO: 144 - RNA, 20 nt, Artificial Sequence
  Antisense oligonucleotide
  misc_feature (1)..(2): BNA scaffold modification
ctcaggaauuugugucuuuc

SEQ ID NO: 145 - RNA, 20 nt, Artificial Sequence
  Antisense oligonucleotide
  misc_feature (19)..(20): BNA scaffold modification
cucaggaauuugugucuutc

SEQ ID NO: 146 - RNA, 18 nt, Artificial Sequence
  Antisense oligonucleotide
caggaauuugugucuuuc

SEQ ID NO: 147 - RNA, 18 nt, Artificial Sequence
  Antisense oligonucleotide
  misc_feature (1)..(1): BNA scaffold modification
caggaauuugugucuuuc

SEQ ID NO: 148 - RNA, 18 nt, Artificial Sequence
  Antisense oligonucleotide
  misc_feature (18)..(18): BNA scaffold modification
caggaauuugugucuuuc

SEQ ID NO: 149 - RNA, 18 nt, Artificial Sequence
  Antisense oligonucleotide
  misc_feature (1)..(1): BNA scaffold modification
  misc_feature (18)..(18): BNA scaffold modification
caggaauuugugucuuuc

SEQ ID NO: 150 - RNA, 18 nt, Artificial Sequence
  Antisense oligonucleotide
  misc_feature (1)..(2): BNA scaffold modification
caggaauuugugucuuuc

SEQ ID NO: 151 - RNA, 18 nt, Artificial Sequence
  Antisense oligonucleotide
  misc_feature (17)..(18): BNA scaffold modification
caggaauuugugucuutc

SEQ ID NO: 152 - RNA, 16 nt, Artificial Sequence
  Antisense oligonucleotide
ggaauuugugucuuuc

SEQ ID NO: 153 - RNA, 16 nt, Artificial Sequence
  Antisense oligonucleotide
  misc_feature (1)..(1): BNA scaffold modification
ggaauuugugucuuuc

SEQ ID NO: 154 - RNA, 16 nt, Artificial Sequence
  Antisense oligonucleotide
  misc_feature (16)..(16): BNA scaffold modification
ggaauuugugucuuuc

SEQ ID NO: 155 - RNA, 16 nt, Artificial Sequence
  Antisense oligonucleotide
  misc_feature (1)..(1): BNA scaffold modification
  misc_feature (16)..(16): BNA scaffold modification
ggaauuugugucuuuc

SEQ ID NO: 156 - RNA, 16 nt, Artificial Sequence
  Antisense oligonucleotide
  misc_feature (1)..(2): BNA scaffold modification
ggaauuugugucuuuc

SEQ ID NO: 157 - RNA, 16 nt, Artificial Sequence
  Antisense oligonucleotide
  misc_feature (15)..(16): BNA scaffold modification
ggaauuugugucuutc

SEQ ID NO: 158 - RNA, 23 nt, Artificial Sequence
  Antisense oligonucleotide
ccauuuguauuuagcauguuccc

SEQ ID NO: 159 - RNA, 23 nt, Artificial Sequence
  Antisense oligonucleotide
  misc_feature (1)..(1): BNA scaffold modification
ccauuuguauuuagcauguuccc

SEQ ID NO: 160 - RNA, 23 nt, Artificial Sequence
  Antisense oligonucleotide
  misc_feature (23)..(23): BNA scaffold modification
ccauuuguauuuagcauguuccc

SEQ ID NO: 161 - RNA, 23 nt, Artificial Sequence
  Antisense oligonucleotide
  misc_feature (1)..(1): BNA scaffold modification
  misc_feature (23)..(23): BNA scaffold modification
ccauuuguauuuagcauguuccc

SEQ ID NO: 162 - RNA, 23 nt, Artificial Sequence
  Antisense oligonucleotide
  misc_feature (1)..(2): BNA scaffold modification
ccauuuguauuuagcauguuccc

SEQ ID NO: 163 - RNA, 23 nt, Artificial Sequence
  Antisense oligonucleotide
  misc_feature (22)..(23): BNA scaffold modification
ccauuuguauuuagcauguuccc

SEQ ID NO: 164 - RNA, 20 nt, Artificial Sequence
  Antisense oligonucleotide
ccauuuguauuuagcauguu

SEQ ID NO: 165 - RNA, 20 nt, Artificial Sequence
  Antisense oligonucleotide
  misc_feature (1)..(1): BNA scaffold modification
ccauuuguauuuagcauguu

SEQ ID NO: 166 - RNA, 20 nt, Artificial Sequence
  Antisense oligonucleotide
  misc_feature (20)..(20): BNA scaffold modification
ccauuuguauuuagcaugut

SEQ ID NO: 167 - RNA, 20 nt, Artificial Sequence
  Antisense oligonucleotide
  misc_feature (1)..(1): BNA scaffold modification
  misc_feature (20)..(20): BNA scaffold modification
ccauuuguauuuagcaugut

SEQ ID NO: 168 - RNA, 20 nt, Artificial Sequence
  Antisense oligonucleotide
  misc_feature (1)..(2): BNA scaffold modification
ccauuuguauuuagcauguu

SEQ ID NO: 169 - RNA, 20 nt, Artificial Sequence
  Antisense oligonucleotide
  misc_feature (19)..(20): BNA scaffold modification
ccauuuguauuuagcaugtt

SEQ ID NO: 170 - RNA, 18 nt, Artificial Sequence
  Antisense oligonucleotide
ccauuuguauuuagcaug

SEQ ID NO: 171 - RNA, 18 nt, Artificial Sequence
  Antisense oligonucleotide
  misc_feature (1)..(1): BNA scaffold modification
ccauuuguauuuagcaug

SEQ ID NO: 172 - RNA, 18 nt, Artificial Sequence
  Antisense oligonucleotide
  misc_feature (18)..(18): BNA scaffold modification
ccauuuguauuuagcaug

SEQ ID NO: 173 - RNA, 18 nt, Artificial Sequence
  Antisense oligonucleotide
  misc_feature (1)..(1): BNA scaffold modification
  misc_feature (18)..(18): BNA scaffold modification
ccauuuguauuuagcaug

SEQ ID NO: 174 - RNA, 18 nt, Artificial Sequence
  Antisense oligonucleotide
  misc_feature (1)..(2): BNA scaffold modification
ccauuuguauuuagcaug

SEQ ID NO: 175 - RNA, 18 nt, Artificial Sequence
  Antisense oligonucleotide
  misc_feature (17)..(18): BNA scaffold modification
ccauuuguauuuagcatg

SEQ ID NO: 176 - RNA, 16 nt, Artificial Sequence
  Antisense oligonucleotide
ccauuuguauuuagca

SEQ ID NO: 177 - RNA, 16 nt, Artificial Sequence
  Antisense oligonucleotide
  misc_feature (1)..(1): BNA scaffold modification
ccauuuguauuuagca

SEQ ID NO: 178 - RNA, 16 nt, Artificial Sequence
  Antisense oligonucleotide
  misc_feature (16)..(16): BNA scaffold modification
ccauuuguauuuagca

SEQ ID NO: 179 - RNA, 16 nt, Artificial Sequence
  Antisense oligonucleotide
  misc_feature (1)..(1): BNA scaffold modification
  misc_feature (16)..(16): BNA scaffold modification
ccauuuguauuuagca

SEQ ID NO: 180 - RNA, 16 nt, Artificial Sequence
  Antisense oligonucleotide
  misc_feature (1)..(2): BNA scaffold modification
ccauuuguauuuagca

SEQ ID NO: 181 - RNA, 16 nt, Artificial Sequence
  Antisense oligonucleotide
  misc_feature (15)..(16): BNA scaffold modification
ccauuuguauuuagca

SEQ ID NO: 182 - RNA, 20 nt, Artificial Sequence
  Antisense oligonucleotide
uuuguauuuagcauguuccc

SEQ ID NO: 183 - RNA, 20 nt, Artificial Sequence
  Antisense oligonucleotide
  misc_feature (1)..(1): BNA scaffold modification
tuuguauuuagcauguuccc

SEQ ID NO: 184 - RNA, 20 nt, Artificial Sequence
  Antisense oligonucleotide
  misc_feature (20)..(20): BNA scaffold modification
uuuguauuuagcauguuccc

SEQ ID NO: 185 - RNA, 20 nt, Artificial Sequence
  Antisense oligonucleotide
  misc_feature (1)..(1): BNA scaffold modification
  misc_feature (20)..(20): BNA scaffold modification
tuuguauuuagcauguuccc

SEQ ID NO: 186 - RNA, 20 nt, Artificial Sequence
  Antisense oligonucleotide
  misc_feature (1)..(2): BNA scaffold modification
ttuguauuuagcauguuccc

SEQ ID NO: 187 - RNA, 20 nt, Artificial Sequence
  Antisense oligonucleotide
  misc_feature (19)..(20): BNA scaffold modification
uuuguauuuagcauguuccc

SEQ ID NO: 188 - RNA, 18 nt, Artificial Sequence
  Antisense oligonucleotide
uguauuuagcauguuccc

SEQ ID NO: 189 - RNA, 18 nt, Artificial Sequence
  Antisense oligonucleotide
  misc_feature (1)..(1): BNA scaffold modification
tguauuuagcauguuccc

SEQ ID NO: 190 - RNA, 18 nt, Artificial Sequence
  Antisense oligonucleotide
  misc_feature (18)..(18): BNA scaffold modification
uguauuuagcauguuccc

SEQ ID NO: 191 - RNA, 18 nt, Artificial Sequence
  Antisense oligonucleotide
  misc_feature (1)..(1): BNA scaffold modification
  misc_feature (18)..(18): BNA scaffold modification
tguauuuagcauguuccc

SEQ ID NO: 192 - RNA, 18 nt, Artificial Sequence
  Antisense oligonucleotide
  misc_feature (1)..(2): BNA scaffold modification
tguauuuagcauguuccc

SEQ ID NO: 193 - RNA, 18 nt, Artificial Sequence
  Antisense oligonucleotide
  misc_feature (17)..(18): BNA scaffold modification
uguauuuagcauguuccc

SEQ ID NO: 194 - RNA, 16 nt, Artificial Sequence
  Antisense oligonucleotide
uauuuagcauguuccc

SEQ ID NO: 195 - RNA, 16 nt, Artificial Sequence
  Antisense oligonucleotide
  misc_feature (1)..(1): BNA scaffold modification
tauuuagcauguuccc

SEQ ID NO: 196 - RNA, 16 nt, Artificial Sequence
  Antisense oligonucleotide
  misc_feature (16)..(16): BNA scaffold modification
uauuuagcauguuccc

SEQ ID NO: 197 - RNA, 16 nt, Artificial Sequence
  Antisense oligonucleotide
  misc_feature (1)..(1): BNA scaffold modification
  misc_feature (16)..(16): BNA scaffold modification
tauuuagcauguuccc

SEQ ID NO: 198 - RNA, 16 nt, Artificial Sequence
  Antisense oligonucleotide
  misc_feature (1)..(2): BNA scaffold modification
tauuuagcauguuccc

SEQ ID NO: 199 - RNA, 16 nt, Artificial Sequence
  Antisense oligonucleotide
  misc_feature (15)..(16): BNA scaffold modification
uauuuagcauguuccc

SEQ ID NO: 200 - RNA, 21 nt, Artificial Sequence
  Antisense oligonucleotide
ucucaggaauuugugucuuuc

SEQ ID NO: 201 - RNA, 21 nt, Artificial Sequence
  Antisense oligonucleotide
  misc_feature (1)..(1): BNA scaffold modification
tcucaggaauuugugucuuuc

SEQ ID NO: 202 - RNA, 21 nt, Artificial Sequence
  Antisense oligonucleotide
  misc_feature (21)..(21): BNA scaffold modification
ucucaggaauuugugucuuuc

SEQ ID NO: 203 - RNA, 21 nt, Artificial Sequence
  Antisense oligonucleotide
  misc_feature (1)..(1): BNA scaffold modification
  misc_feature (21)..(21): BNA scaffold modification
tcucaggaauuugugucuuuc

SEQ ID NO: 204 - RNA, 21 nt, Artificial Sequence
  Antisense oligonucleotide
  misc_feature (1)..(2): BNA scaffold modification
tcucaggaauuugugucuuuc

SEQ ID NO: 205 - RNA, 21 nt, Artificial Sequence
  Antisense oligonucleotide
  misc_feature (20)..(21): BNA scaffold modification
ucucaggaauuugugucuutc

SEQ ID NO: 206 - RNA, 18 nt, Artificial Sequence
  Antisense oligonucleotide
ucucaggaauuugugucu

SEQ ID NO: 207 - RNA, 18 nt, Artificial Sequence
  Antisense oligonucleotide
  misc_feature (1)..(1): BNA scaffold modification
tcucaggaauuugugucu

SEQ ID NO: 208 - RNA, 18 nt, Artificial Sequence
  Antisense oligonucleotide
  misc_feature (18)..(18): BNA scaffold modification
ucucaggaauuuguguct

SEQ ID NO: 209 - RNA, 18 nt, Artificial Sequence
  Antisense oligonucleotide
  misc_feature (1)..(1): BNA scaffold modification
  misc_feature (18)..(18): BNA scaffold modification
tcucaggaauuuguguct

SEQ ID NO: 210 - RNA, 18 nt, Artificial Sequence
  Antisense oligonucleotide
  misc_feature (1)..(2): BNA scaffold modification
tcucaggaauuugugucu

SEQ ID NO: 211 - RNA, 18 nt, Artificial Sequence
  Antisense oligonucleotide
  misc_feature (17)..(18): BNA scaffold modification
ucucaggaauuuguguct

SEQ ID NO: 212 - RNA, 16 nt, Artificial Sequence
  Antisense oligonucleotide
ucucaggaauuugugu

SEQ ID NO: 213 - RNA, 16 nt, Artificial Sequence
  Antisense oligonucleotide
  misc_feature (1)..(1): BNA scaffold modification
tcucaggaauuugugu

SEQ ID NO: 214 - RNA, 16 nt, Artificial Sequence
  Antisense oligonucleotide
  misc_feature (16)..(16): BNA scaffold modification
ucucaggaauuugugt

SEQ ID NO: 215 - RNA, 16 nt, Artificial Sequence
  Antisense oligonucleotide
  misc_feature (1)..(1): BNA scaffold modification
  misc_feature (16)..(16): BNA scaffold modification
tcucaggaauuugugt

SEQ ID NO: 216 - RNA, 16 nt, Artificial Sequence
  Antisense oligonucleotide
  misc_feature (1)..(2): BNA scaffold modification
tcucaggaauuugugu

SEQ ID NO: 217 - RNA, 16 nt, Artificial Sequence
  Antisense oligonucleotide
  misc_feature (15)..(16): BNA scaffold modification
ucucaggaauuugugt

SEQ ID NO: 218 - RNA, 18 nt, Artificial Sequence
  Antisense oligonucleotide
caggaauuugugucuuuc

SEQ ID NO: 219 - RNA, 18 nt, Artificial Sequence
  Antisense oligonucleotide
  misc_feature (1)..(1): BNA scaffold modification
caggaauuugugucuuuc

SEQ ID NO: 220 - RNA, 18 nt, Artificial Sequence
  Antisense oligonucleotide
  misc_feature (18)..(18): BNA scaffold modification
caggaauuugugucuuuc

SEQ ID NO: 221 - RNA, 18 nt, Artificial Sequence
  Antisense oligonucleotide
  misc_feature (1)..(1): BNA scaffold modification
  misc_feature (18)..(18): BNA scaffold modification
caggaauuugugucuuuc

SEQ ID NO: 222 - RNA, 18 nt, Artificial Sequence
  Antisense oligonucleotide
  misc_feature (1)..(2): BNA scaffold modification
caggaauuugugucuuuc

SEQ ID NO: 223 - RNA, 18 nt, Artificial Sequence
  Antisense oligonucleotide
  misc_feature (17)..(18): BNA scaffold modification
caggaauuugugucuutc

SEQ ID NO: 224 - RNA, 16 nt, Artificial Sequence
  Antisense oligonucleotide
ggaauuugugucuuuc

SEQ ID NO: 225 - RNA, 16 nt, Artificial Sequence
  Antisense oligonucleotide
  misc_feature (1)..(1): BNA scaffold modification
ggaauuugugucuuuc

SEQ ID NO: 226 - RNA, 16 nt, Artificial Sequence
  Antisense oligonucleotide
  misc_feature (16)..(16): BNA scaffold modification
ggaauuugugucuuuc

SEQ ID NO: 227 - RNA, 16 nt, Artificial Sequence
  Antisense oligonucleotide
  misc_feature (1)..(1): BNA scaffold modification
  misc_feature (16)..(16): BNA scaffold modification
ggaauuugugucuuuc

SEQ ID NO: 228 - RNA, 16 nt, Artificial Sequence
  Antisense oligonucleotide
  misc_feature (1)..(2): BNA scaffold modification
ggaauuugugucuuuc

SEQ ID NO: 229 - RNA, 16 nt, Artificial Sequence
  Antisense oligonucleotide
  misc_feature (15)..(16): BNA scaffold modification
ggaauuugugucuutc

SEQ ID NO: 230 - RNA, 23 nt, Artificial Sequence
  Antisense oligonucleotide
gccauuucucaacagaucuguca

SEQ ID NO: 231 - RNA, 23 nt, Artificial Sequence
  Antisense oligonucleotide
  misc_feature (1)..(1): BNA scaffold modification
gccauuucucaacagaucuguca

SEQ ID NO: 232 - RNA, 23 nt, Artificial Sequence
  Antisense oligonucleotide
  misc_feature (23)..(23): BNA scaffold modification
gccauuucucaacagaucuguca

SEQ ID NO: 233 - RNA, 23 nt, Artificial Sequence
  Antisense oligonucleotide
  misc_feature (1)..(1): BNA scaffold modification
  misc_feature (23)..(23): BNA scaffold modification
gccauuucucaacagaucuguca

SEQ ID NO: 234 - RNA, 23 nt, Artificial Sequence
  Antisense oligonucleotide
  misc_feature (1)..(2): BNA scaffold modification
gccauuucucaacagaucuguca

SEQ ID NO: 235 - RNA, 23 nt, Artificial Sequence
  Antisense oligonucleotide
  misc_feature (22)..(23): BNA scaffold modification
gccauuucucaacagaucuguca

SEQ ID NO: 236 - RNA, 20 nt, Artificial Sequence
  Antisense oligonucleotide
auuucucaacagaucuguca

SEQ ID NO: 237 - RNA, 20 nt, Artificial Sequence
  Antisense oligonucleotide
  misc_feature (1)..(1): BNA scaffold modification
auuucucaacagaucuguca

SEQ ID NO: 238 - RNA, 20 nt, Artificial Sequence
  Antisense oligonucleotide
  misc_feature (20)..(20): BNA scaffold modification
auuucucaacagaucuguca

SEQ ID NO: 239 - RNA, 20 nt, Artificial Sequence
  Antisense oligonucleotide
  misc_feature (1)..(1): BNA scaffold modification
  misc_feature (20)..(20): BNA scaffold modification
auuucucaacagaucuguca

SEQ ID NO: 240 - RNA, 20 nt, Artificial Sequence
  Antisense oligonucleotide
  misc_feature (1)..(2): BNA scaffold modification
atuucucaacagaucuguca

SEQ ID NO: 241 - RNA, 20 nt, Artificial Sequence
  Antisense oligonucleotide
  misc_feature (19)..(20): BNA scaffold modification
auuucucaacagaucuguca

SEQ ID NO: 242 - RNA, 18 nt, Artificial Sequence
  Antisense oligonucleotide
uucucaacagaucuguca

SEQ ID NO: 243 - RNA, 18 nt, Artificial Sequence
  Antisense oligonucleotide
  misc_feature (1)..(1): BNA scaffold modification
tucucaacagaucuguca

SEQ ID NO: 244 - RNA, 18 nt, Artificial Sequence
  Antisense oligonucleotide
  misc_feature (18)..(18): BNA scaffold modification
uucucaacagaucuguca

SEQ ID NO: 245 - RNA, 18 nt, Artificial Sequence
  Antisense oligonucleotide
  misc_feature (1)..(1): BNA scaffold modification
  misc_feature (18)..(18): BNA scaffold modification
tucucaacagaucuguca

SEQ ID NO: 246 - RNA, 18 nt, Artificial Sequence
  Antisense oligonucleotide
  misc_feature (1)..(2): BNA scaffold modification
ttcucaacagaucuguca

SEQ ID NO: 247 - RNA, 18 nt, Artificial Sequence
  Antisense oligonucleotide
  misc_feature (17)..(18): BNA scaffold modification
uucucaacagaucuguca

SEQ ID NO: 248 - RNA, 16 nt, Artificial Sequence
  Antisense oligonucleotide
cucaacagaucuguca

SEQ ID NO: 249 - RNA, 16 nt, Artificial Sequence
  Antisense oligonucleotide
  misc_feature (1)..(1): BNA scaffold modification
cucaacagaucuguca

SEQ ID NO: 250 - RNA, 16 nt, Artificial Sequence
  Antisense oligonucleotide
  misc_feature (16)..(16): BNA scaffold modification
cucaacagaucuguca

SEQ ID NO: 251 - RNA, 16 nt, Artificial Sequence
  Antisense oligonucleotide
  misc_feature (1)..(1): BNA scaffold modification
  misc_feature (16)..(16): BNA scaffold modification
cucaacagaucuguca

SEQ ID NO: 252 - RNA, 16 nt, Artificial Sequence
  Antisense oligonucleotide
  misc_feature (1)..(2): BNA scaffold modification
ctcaacagaucuguca

SEQ ID NO: 253 - RNA, 16 nt, Artificial Sequence
  Antisense oligonucleotide
  misc_feature (15)..(16): BNA scaffold modification
cucaacagaucuguca

SEQ ID NO: 254 - RNA, 20 nt, Artificial Sequence
  Antisense oligonucleotide
gccauuucucaacagaucug

SEQ ID NO: 255 - RNA, 20 nt, Artificial Sequence
  Antisense oligonucleotide
  misc_feature (1)..(1): BNA scaffold modification
gccauuucucaacagaucug

SEQ ID NO: 256 - RNA, 20 nt, Artificial Sequence
  Antisense oligonucleotide
  misc_feature (20)..(20): BNA scaffold modification
gccauuucucaacagaucug

SEQ ID NO: 257 - RNA, 20 nt, Artificial Sequence
  Antisense oligonucleotide
  misc_feature (1)..(1): BNA scaffold modification
  misc_feature (20)..(20): BNA scaffold modification
gccauuucucaacagaucug

SEQ ID NO: 258 - RNA, 20 nt, Artificial Sequence
  Antisense oligonucleotide
  misc_feature (1)..(2): BNA scaffold modification
gccauuucucaacagaucug

SEQ ID NO: 259 - RNA, 20 nt, Artificial Sequence
  Antisense oligonucleotide
  misc_feature (19)..(20): BNA scaffold modification
gccauuucucaacagauctg

SEQ ID NO: 260 - RNA, 18 nt, Artificial Sequence
  Antisense oligonucleotide
gccauuucucaacagauc

SEQ ID NO: 261 - RNA, 18 nt, Artificial Sequence
  Antisense oligonucleotide
  misc_feature (1)..(1): BNA scaffold modification
gccauuucucaacagauc

SEQ ID NO: 262 - RNA, 18 nt, Artificial Sequence
  Antisense oligonucleotide
  misc_feature (18)..(18): BNA scaffold modification
gccauuucucaacagauc

SEQ ID NO: 263 - RNA, 18 nt, Artificial Sequence
  Antisense oligonucleotide
  misc_feature (1)..(1): BNA scaffold modification
  misc_feature (18)..(18): BNA scaffold modification
gccauuucucaacagauc

SEQ ID NO: 264 - RNA, 18 nt, Artificial Sequence
  Antisense oligonucleotide
  misc_feature (1)..(2): BNA scaffold modification
gccauuucucaacagauc

SEQ ID NO: 265 - RNA, 18 nt, Artificial Sequence
  Antisense oligonucleotide
  misc_feature (17)..(18): BNA scaffold modification
gccauuucucaacagatc

SEQ ID NO: 266 - RNA, 16 nt, Artificial Sequence
  Antisense oligonucleotide
gccauuucucaacaga

SEQ ID NO: 267 - RNA, 16 nt, Artificial Sequence
  Antisense oligonucleotide
  misc_feature (1)..(1): BNA scaffold modification
gccauuucucaacaga

SEQ ID NO: 268 - RNA, 16 nt, Artificial Sequence
  Antisense oligonucleotide
  misc_feature (16)..(16): BNA scaffold modification
gccauuucucaacaga

SEQ ID NO: 269 - RNA, 16 nt, Artificial Sequence
  Antisense oligonucleotide
  misc_feature (1)..(1): BNA scaffold modification
  misc_feature (16)..(16): BNA scaffold modification
gccauuucucaacaga

SEQ ID NO: 270 - RNA, 16 nt, Artificial Sequence
  Antisense oligonucleotide
  misc_feature (1)..(2): BNA scaffold modification
gccauuucucaacaga

SEQ ID NO: 271 - RNA, 16 nt, Artificial Sequence
  Antisense oligonucleotide
  misc_feature (15)..(16): BNA scaffold modification
gccauuucucaacaga

SEQ ID NO: 272 - RNA, 23 nt, Artificial Sequence
  Antisense oligonucleotide
ugcccaaugccauccuggaguuc

SEQ ID NO: 273 - RNA, 23 nt, Artificial Sequence
  Antisense oligonucleotide
  misc_feature (1)..(1): BNA scaffold modification
tgcccaaugccauccuggaguuc

SEQ ID NO: 274 - RNA, 23 nt, Artificial Sequence
  Antisense oligonucleotide
  misc_feature (23)..(23): BNA scaffold modification
ugcccaaugccauccuggaguuc

SEQ ID NO: 275 - RNA, 23 nt, Artificial Sequence
  Antisense oligonucleotide
  misc_feature (1)..(1): BNA scaffold modification
  misc_feature (23)..(23): BNA scaffold modification
tgcccaaugccauccuggaguuc

SEQ ID NO: 276 - RNA, 23 nt, Artificial Sequence
  Antisense oligonucleotide
  misc_feature (1)..(2): BNA scaffold modification
tgcccaaugccauccuggaguuc

SEQ ID NO: 277 - RNA, 23 nt, Artificial Sequence
  Antisense oligonucleotide
  misc_feature (22)..(23): BNA scaffold modification
ugcccaaugccauccuggagutc

SEQ ID NO: 278 - RNA, 20 nt, Artificial Sequence
  Antisense oligonucleotide
ugcccaaugccauccuggag

SEQ ID NO: 279 - RNA, 20 nt, Artificial Sequence
  Antisense oligonucleotide
  misc_feature (1)..(1): BNA scaffold modification
tgcccaaugccauccuggag

SEQ ID NO: 280 - RNA, 20 nt, Artificial Sequence
  Antisense oligonucleotide
  misc_feature (20)..(20): BNA scaffold modification
ugcccaaugccauccuggag

SEQ ID NO: 281 - RNA, 20 nt, Artificial Sequence
  Antisense oligonucleotide
  misc_feature (1)..(1): BNA scaffold modification
  misc_feature (20)..(20): BNA scaffold modification
tgcccaaugccauccuggag

SEQ ID NO: 282 - RNA, 20 nt, Artificial Sequence
  Antisense oligonucleotide
  misc_feature (1)..(2): BNA scaffold modification
tgcccaaugccauccuggag

SEQ ID NO: 283 - RNA, 20 nt, Artificial Sequence
  Antisense oligonucleotide
  misc_feature (19)..(20): BNA scaffold modification
ugcccaaugccauccuggag

SEQ ID NO: 284 - RNA, 18 nt, Artificial Sequence
  Antisense oligonucleotide
ugcccaaugccauccugg

SEQ ID NO: 285 - RNA, 18 nt, Artificial Sequence
  Antisense oligonucleotide
  misc_feature (1)..(1): BNA scaffold modification
tgcccaaugccauccugg

SEQ ID NO: 286 - RNA, 18 nt, Artificial Sequence
  Antisense oligonucleotide
  misc_feature (18)..(18): BNA scaffold modification
ugcccaaugccauccugg

SEQ ID NO: 287 - RNA, 18 nt, Artificial Sequence
  Antisense oligonucleotide
  misc_feature (1)..(1): BNA scaffold modification
  misc_feature (18)..(18): BNA scaffold modification
tgcccaaugccauccugg

SEQ ID NO: 288 - RNA, 18 nt, Artificial Sequence
  Antisense oligonucleotide
  misc_feature (1)..(2): BNA scaffold modification
tgcccaaugccauccugg

SEQ ID NO: 289 - RNA, 18 nt, Artificial Sequence
  Antisense oligonucleotide
  misc_feature (17)..(18): BNA scaffold modification
ugcccaaugccauccugg

SEQ ID NO: 290 - RNA, 16 nt, Artificial Sequence
  Antisense oligonucleotide
ugcccaaugccauccu

SEQ ID NO: 291 - RNA, 16 nt, Artificial Sequence
  Antisense oligonucleotide
  misc_feature (1)..(1): BNA scaffold modification
tgcccaaugccauccu

SEQ ID NO: 292 - RNA, 16 nt, Artificial Sequence
  Antisense oligonucleotide
  misc_feature (16)..(16): BNA scaffold modification
ugcccaaugccaucct

SEQ ID NO: 293 - RNA, 16 nt, Artificial Sequence
  Antisense oligonucleotide
  misc_feature (1)..(1): BNA scaffold modification
  misc_feature (16)..(16): BNA scaffold modification
tgcccaaugccaucct

SEQ ID NO: 294 - RNA, 16 nt, Artificial Sequence
  Antisense oligonucleotide
  misc_feature (1)..(2): BNA scaffold modification
tgcccaaugccauccu

SEQ ID NO: 295 - RNA, 16 nt, Artificial Sequence
  Antisense oligonucleotide
  misc_feature (15)..(16): BNA scaffold modification
ugcccaaugccaucct

SEQ ID NO: 296 - RNA, 20 nt, Artificial Sequence
  Antisense oligonucleotide
ccaaugccauccuggaguuc

SEQ ID NO: 297 - RNA, 20 nt, Artificial Sequence
  Antisense oligonucleotide
  misc_feature (1)..(1): BNA scaffold modification
ccaaugccauccuggaguuc

SEQ ID NO: 298 - RNA, 20 nt, Artificial Sequence
  Antisense oligonucleotide
  misc_feature (20)..(20): BNA scaffold modification
ccaaugccauccuggaguuc

SEQ ID NO: 299 - RNA, 20 nt, Artificial Sequence
  Antisense oligonucleotide
  misc_feature (1)..(1): BNA scaffold modification
  misc_feature (20)..(20): BNA scaffold modification
ccaaugccauccuggaguuc

SEQ ID NO: 300 - RNA, 20 nt, Artificial Sequence
  Antisense oligonucleotide
  misc_feature (1)..(2): BNA scaffold modification
ccaaugccauccuggaguuc

SEQ ID NO: 301 - RNA, 20 nt, Artificial Sequence
  Antisense oligonucleotide
  misc_feature (19)..(20): BNA scaffold modification
ccaaugccauccuggagutc

SEQ ID NO: 302 - RNA, 18 nt, Artificial Sequence
  Antisense oligonucleotide
aaugccauccuggaguuc

SEQ ID NO: 303 - RNA, 18 nt, Artificial Sequence
  Antisense oligonucleotide
  misc_feature (1)..(1): BNA scaffold modification
aaugccauccuggaguuc

SEQ ID NO: 304 - RNA, 18 nt, Artificial Sequence
  Antisense oligonucleotide
  misc_feature (18)..(18): BNA scaffold modification
aaugccauccuggaguuc

SEQ ID NO: 305 - RNA, 18 nt, Artificial Sequence
  Antisense oligonucleotide
  misc_feature (1)..(1): BNA scaffold modification
  misc_feature (18)..(18): BNA scaffold modification
aaugccauccuggaguuc

SEQ ID NO: 306 - RNA, 18 nt, Artificial Sequence
  Antisense oligonucleotide
  misc_feature (1)..(2): BNA scaffold modification
aaugccauccuggaguuc

SEQ ID NO: 307 - RNA, 18 nt, Artificial Sequence
  Antisense oligonucleotide
  misc_feature (17)..(18): BNA scaffold modification
aaugccauccuggagutc

SEQ ID NO: 308 - RNA, 16 nt, Artificial Sequence
  Antisense oligonucleotide
ugccauccuggaguuc

SEQ ID NO: 309 - RNA, 16 nt, Artificial Sequence
  Antisense oligonucleotide
  misc_feature (1)..(1): BNA scaffold modification
tgccauccuggaguuc

SEQ ID NO: 310 - RNA, 16 nt, Artificial Sequence
  Antisense oligonucleotide
  misc_feature (16)..(16): BNA scaffold modification
ugccauccuggaguuc

SEQ ID NO: 311 - RNA, 16 nt, Artificial Sequence
  Antisense oligonucleotide
  misc_feature (1)..(1): BNA scaffold modification
  misc_feature (16)..(16): BNA scaffold modification
tgccauccuggaguuc

SEQ ID NO: 312 - RNA, 16 nt, Artificial Sequence
  Antisense oligonucleotide
  misc_feature (1)..(2): BNA scaffold modification
tgccauccuggaguuc

SEQ ID NO: 313 - RNA, 16 nt, Artificial Sequence
  Antisense oligonucleotide
  misc_feature (15)..(16): BNA scaffold modification
ugccauccuggagutc

SEQ ID NO: 314 - RNA, 18 nt, Artificial Sequence
  Antisense oligonucleotide
ccaaugccauccuggagu

SEQ ID NO: 315 - RNA, 18 nt, Artificial Sequence
  Antisense oligonucleotide
  misc_feature (1)..(1): BNA scaffold modification
ccaaugccauccuggagu

SEQ ID NO: 316 - RNA, 18 nt, Artificial Sequence
  Antisense oligonucleotide
  misc_feature (18)..(18): BNA scaffold modification
ccaaugccauccuggagt

SEQ ID NO: 317 - RNA, 18 nt, Artificial Sequence
  Antisense oligonucleotide
  misc_feature (1)..(1): BNA scaffold modification
  misc_feature (18)..(18): BNA scaffold modification
ccaaugccauccuggagt

SEQ ID NO: 318 - RNA, 18 nt, Artificial Sequence
  Antisense oligonucleotide
  misc_feature (1)..(2): BNA scaffold modification
ccaaugccauccuggagu

SEQ ID NO: 319 - RNA, 18 nt, Artificial Sequence
  Antisense oligonucleotide
  misc_feature (17)..(18): BNA scaffold modification
ccaaugccauccuggagt

SEQ ID NO: 320 - RNA, 22 nt, Artificial Sequence
  Antisense oligonucleotide
ccaguugcauucaauguucuga

SEQ ID NO: 321 - RNA, 22 nt, Artificial Sequence
  Antisense oligonucleotide
  misc_feature (1)..(1): BNA scaffold modification
ccaguugcauucaauguucuga

SEQ ID NO: 322 - RNA, 22 nt, Artificial Sequence
  Antisense oligonucleotide
  misc_feature (22)..(22): BNA scaffold modification
ccaguugcauucaauguucuga

SEQ ID NO: 323 - RNA, 22 nt, Artificial Sequence
  Antisense oligonucleotide
  misc_feature (1)..(1): BNA scaffold modification
  misc_feature (22)..(22): BNA scaffold modification
ccaguugcauucaauguucuga

SEQ ID NO: 324 - RNA, 22 nt, Artificial Sequence
  Antisense oligonucleotide
  misc_feature (1)..(2): BNA scaffold modification
ccaguugcauucaauguucuga

SEQ ID NO: 325 - RNA, 22 nt, Artificial Sequence
  Antisense oligonucleotide
  misc_feature (21)..(22): BNA scaffold modification
ccaguugcauucaauguucuga

SEQ ID NO: 326 - RNA, 20 nt, Artificial Sequence
  Antisense oligonucleotide
ccaguugcauucaauguucu

SEQ ID NO: 327 - RNA, 20 nt, Artificial Sequence
  Antisense oligonucleotide
  misc_feature (1)..(1): BNA scaffold modification
ccaguugcauucaauguucu

SEQ ID NO: 328 - RNA, 20 nt, Artificial Sequence
  Antisense oligonucleotide
  misc_feature (20)..(20): BNA scaffold modification
ccaguugcauucaauguuct

SEQ ID NO: 329 - RNA, 20 nt, Artificial Sequence
  Antisense oligonucleotide
  misc_feature (1)..(1): BNA scaffold modification
  misc_feature (20)..(20): BNA scaffold modification
ccaguugcauucaauguuct

SEQ ID NO: 330 - RNA, 20 nt, Artificial Sequence
  Antisense oligonucleotide
  misc_feature (1)..(2): BNA scaffold modification
ccaguugcauucaauguucu

SEQ ID NO: 331 - RNA, 20 nt, Artificial Sequence
  Antisense oligonucleotide
  misc_feature (19)..(20): BNA scaffold modification
ccaguugcauucaauguuct

SEQ ID NO: 332 - RNA, 18 nt, Artificial Sequence
  Antisense oligonucleotide
ccaguugcauucaauguu

SEQ ID NO: 333 - RNA, 18 nt, Artificial Sequence
  Antisense oligonucleotide
  misc_feature (1)..(1): BNA scaffold modification
ccaguugcauucaauguu

SEQ ID NO: 334 - RNA, 18 nt, Artificial Sequence
  Antisense oligonucleotide
  misc_feature (18)..(18): BNA scaffold modification
ccaguugcauucaaugut

SEQ ID NO: 335 - RNA, 18 nt, Artificial Sequence
  Antisense oligonucleotide
  misc_feature (1)..(1): BNA scaffold modification
  misc_feature (18)..(18): BNA scaffold modification
ccaguugcauucaaugut

SEQ ID NO: 336 - RNA, 18 nt, Artificial Sequence
  Antisense oligonucleotide
  misc_feature (1)..(2): BNA scaffold modification
ccaguugcauucaauguu

SEQ ID NO: 337 - RNA, 18 nt, Artificial Sequence
  Antisense oligonucleotide
  misc_feature (17)..(18): BNA scaffold modification
ccaguugcauucaaugtt

SEQ ID NO: 338 - RNA, 16 nt, Artificial Sequence
  Antisense oligonucleotide
ccaguugcauucaaug

SEQ ID NO: 339 - RNA, 16 nt, Artificial Sequence
  Antisense oligonucleotide
  misc_feature (1)..(1): BNA scaffold modification
ccaguugcauucaaug

SEQ ID NO: 340 - RNA, 16 nt, Artificial Sequence
  Antisense oligonucleotide
  misc_feature (16)..(16): BNA scaffold modification
ccaguugcauucaaug

SEQ ID NO: 341 - RNA, 16 nt, Artificial Sequence
  Antisense oligonucleotide
  misc_feature (1)..(1): BNA scaffold modification
  misc_feature (16)..(16): BNA scaffold modification
ccaguugcauucaaug

SEQ ID NO: 342 - RNA, 16 nt, Artificial Sequence
  Antisense oligonucleotide
  misc_feature (1)..(2): BNA scaffold modification
ccaguugcauucaaug

SEQ ID NO: 343 - RNA, 16 nt, Artificial Sequence
  Antisense oligonucleotide
  misc_feature (15)..(16): BNA scaffold modification
ccaguugcauucaatg

SEQ ID NO: 344 - RNA, 20 nt, Artificial Sequence
  Antisense oligonucleotide
aguugcauucaauguucuga

SEQ ID NO: 345 - RNA, 20 nt, Artificial Sequence
  Antisense oligonucleotide
  misc_feature (1)..(1): BNA scaffold modification
aguugcauucaauguucuga

SEQ ID NO: 346 - RNA, 20 nt, Artificial Sequence
  Antisense oligonucleotide
  misc_feature (20)..(20): BNA scaffold modification
aguugcauucaauguucuga

SEQ ID NO: 347 - RNA, 20 nt, Artificial Sequence
  Antisense oligonucleotide
  misc_feature (1)..(1): BNA scaffold modification
  misc_feature (20)..(20): BNA scaffold modification
aguugcauucaauguucuga

SEQ ID NO: 348 - RNA, 20 nt, Artificial Sequence
  Antisense oligonucleotide
  misc_feature (1)..(2): BNA scaffold modification
aguugcauucaauguucuga

SEQ ID NO: 349 - RNA, 20 nt, Artificial Sequence
  Antisense oligonucleotide
  misc_feature (19)..(20): BNA scaffold modification
aguugcauucaauguucuga

SEQ ID NO: 350 - RNA, 18 nt, Artificial Sequence
  Antisense oligonucleotide
uugcauucaauguucuga

SEQ ID NO: 351 - RNA, 18 nt, Artificial Sequence
  Antisense oligonucleotide
  misc_feature (1)..(1): BNA scaffold modification
tugcauucaauguucuga

SEQ ID NO: 352 - RNA, 18 nt, Artificial Sequence
  Antisense oligonucleotide
  misc_feature (18)..(18): BNA scaffold modification
uugcauucaauguucuga

SEQ ID NO: 353 - RNA, 18 nt, Artificial Sequence
  Antisense oligonucleotide
  misc_feature (1)..(1): BNA scaffold modification
  misc_feature (18)..(18): BNA scaffold modification
tugcauucaauguucuga

SEQ ID NO: 354 - RNA, 18 nt, Artificial Sequence
  Antisense oligonucleotide
  misc_feature (1)..(2): BNA scaffold modification
ttgcauucaauguucuga

SEQ ID NO: 355 - RNA, 18 nt, Artificial Sequence
  Antisense oligonucleotide
  misc_feature (17)..(18): BNA scaffold modification
uugcauucaauguucuga

SEQ ID NO: 356 - RNA, 16 nt, Artificial Sequence
  Antisense oligonucleotide
gcauucaauguucuga

SEQ ID NO: 357 - RNA, 16 nt, Artificial Sequence
  Antisense oligonucleotide
  misc_feature (1)..(1): BNA scaffold modification
gcauucaauguucuga

SEQ ID NO: 358 - RNA, 16 nt, Artificial Sequence
  Antisense oligonucleotide
  misc_feature (16)..(16): BNA scaffold modification
gcauucaauguucuga

SEQ ID NO: 359 - RNA, 16 nt, Artificial Sequence
  Antisense oligonucleotide
  misc_feature (1)..(1): BNA scaffold modification
  misc_feature (16)..(16): BNA scaffold modification
gcauucaauguucuga

SEQ ID NO: 360 - RNA, 16 nt, Artificial Sequence
  Antisense oligonucleotide
  misc_feature (1)..(2): BNA scaffold modification
gcauucaauguucuga

SEQ ID NO: 361 - RNA, 16 nt, Artificial Sequence
  Antisense oligonucleotide
  misc_feature (15)..(16): BNA scaffold modification
gcauucaauguucuga

SEQ ID NO: 362 - RNA, 18 nt, Artificial Sequence
  Antisense oligonucleotide
aguugcauucaauguucu

SEQ ID NO: 363 - RNA, 18 nt, Artificial Sequence
  Antisense oligonucleotide
  misc_feature (1)..(1): BNA scaffold modification
aguugcauucaauguucu

SEQ ID NO: 364 - RNA, 18 nt, Artificial Sequence
  Antisense oligonucleotide
  misc_feature (18)..(18): BNA scaffold modification
aguugcauucaauguuct

SEQ ID NO: 365 - RNA, 18 nt, Artificial Sequence
  Antisense oligonucleotide
  misc_feature (1)..(1): BNA scaffold modification
  misc_feature (18)..(18): BNA scaffold modification
aguugcauucaauguuct

SEQ ID NO: 366 - RNA, 18 nt, Artificial Sequence
  Antisense oligonucleotide
  misc_feature (1)..(2): BNA scaffold modification
aguugcauucaauguucu

SEQ ID NO: 367 - RNA, 18 nt, Artificial Sequence
  Antisense oligonucleotide
  misc_feature (17)..(18): BNA scaffold modification
aguugcauucaauguuct

SEQ ID NO: 368 - RNA, 22 nt, Artificial Sequence
  Antisense oligonucleotide
uccuguagaauacuggcaucug

SEQ ID NO: 369 - RNA, 22 nt, Artificial Sequence
  Antisense oligonucleotide
  misc_feature (1)..(1): BNA scaffold modification
tccuguagaauacuggcaucug

SEQ ID NO: 370 - RNA, 22 nt, Artificial Sequence
  Antisense oligonucleotide
  misc_feature (22)..(22): BNA scaffold modification
uccuguagaauacuggcaucug

SEQ ID NO: 371 - RNA, 22 nt, Artificial Sequence
  Antisense oligonucleotide
  misc_feature (1)..(1): BNA scaffold modification
  misc_feature (22)..(22): BNA scaffold modification
tccuguagaauacuggcaucug

SEQ ID NO: 372 - RNA, 22 nt, Artificial Sequence
  Antisense oligonucleotide
  misc_feature (1)..(2): BNA scaffold modification
tccuguagaauacuggcaucug

SEQ ID NO: 373 - RNA, 22 nt, Artificial Sequence
  Antisense oligonucleotide
  misc_feature (21)..(22): BNA scaffold modification
uccuguagaauacuggcauctg

SEQ ID NO: 374 - RNA, 20 nt, Artificial Sequence
  Antisense oligonucleotide
uccuguagaauacuggcauc

SEQ ID NO: 375 - RNA, 20 nt, Artificial Sequence
  Antisense oligonucleotide
  misc_feature (1)..(1): BNA scaffold modification
tccuguagaauacuggcauc

SEQ ID NO: 376 - RNA, 20 nt, Artificial Sequence
  Antisense oligonucleotide
  misc_feature (20)..(20): BNA scaffold modification
uccuguagaauacuggcauc

SEQ ID NO: 377 - RNA, 20 nt, Artificial Sequence
  Antisense oligonucleotide
  misc_feature (1)..(1): BNA scaffold modification
  misc_feature (20)..(20): BNA scaffold modification
tccuguagaauacuggcauc

SEQ ID NO: 378 - RNA, 20 nt, Artificial Sequence
  Antisense oligonucleotide
  misc_feature (1)..(2): BNA scaffold modification
tccuguagaauacuggcauc

SEQ ID NO: 379 - RNA, 20 nt, Artificial Sequence
  Antisense oligonucleotide
  misc_feature (19)..(20): BNA scaffold modification
uccuguagaauacuggcatc

SEQ ID NO: 380 - RNA, 18 nt, Artificial Sequence
  Antisense oligonucleotide
uccuguagaauacuggca

SEQ ID NO: 381 - RNA, 18 nt, Artificial Sequence
  Antisense oligonucleotide
  misc_feature (1)..(1): BNA scaffold modification
tccuguagaauacuggca

SEQ ID NO: 382 - RNA, 18 nt, Artificial Sequence
  Antisense oligonucleotide
  misc_feature (18)..(18): BNA scaffold modification
uccuguagaauacuggca

SEQ ID NO: 383 - RNA, 18 nt, Artificial Sequence
  Antisense oligonucleotide
  misc_feature (1)..(1): BNA scaffold modification
  misc_feature (18)..(18): BNA scaffold modification
tccuguagaauacuggca

SEQ ID NO: 384 - RNA, 18 nt, Artificial Sequence
  Antisense oligonucleotide
  misc_feature (1)..(2): BNA scaffold modification
tccuguagaauacuggca

SEQ ID NO: 385 - RNA, 18 nt, Artificial Sequence
  Antisense oligonucleotide
  misc_feature (17)..(18): BNA scaffold modification
uccuguagaauacuggca

SEQ ID NO: 386 - RNA, 16 nt, Artificial Sequence
  Antisense oligonucleotide
uccuguagaauacugg

SEQ ID NO: 387 - RNA, 16 nt, Artificial Sequence
  Antisense oligonucleotide
  misc_feature (1)..(1): BNA scaffold modification
tccuguagaauacugg

SEQ ID NO: 388 - RNA, 16 nt, Artificial Sequence
  Antisense oligonucleotide
  misc_feature (16)..(16): BNA scaffold modification
uccuguagaauacugg

SEQ ID NO: 389 - RNA, 16 nt, Artificial Sequence
  Antisense oligonucleotide
  misc_feature (1)..(1): BNA scaffold modification
  misc_feature (16)..(16): BNA scaffold modification
tccuguagaauacugg

SEQ ID NO: 390 - RNA, 16 nt, Artificial Sequence
  Antisense oligonucleotide
  misc_feature (1)..(2): BNA scaffold modification
tccuguagaauacugg

SEQ ID NO: 391 - RNA, 16 nt, Artificial Sequence
  Antisense oligonucleotide
  misc_feature (15)..(16): BNA scaffold modification
uccuguagaauacugg

SEQ ID NO: 392 - RNA, 20 nt, Artificial Sequence
  Antisense oligonucleotide
cuguagaauacuggcaucug

SEQ ID NO: 393 - RNA, 20 nt, Artificial Sequence
  Antisense oligonucleotide
  misc_feature (1)..(1): BNA scaffold modification
cuguagaauacuggcaucug

SEQ ID NO: 394 - RNA, 20 nt, Artificial Sequence
  Antisense oligonucleotide
  misc_feature (20)..(20): BNA scaffold modification
cuguagaauacuggcaucug

SEQ ID NO: 395 - RNA, 20 nt, Artificial Sequence
  Antisense oligonucleotide
  misc_feature (1)..(1): BNA scaffold modification
  misc_feature (20)..(20): BNA scaffold modification
cuguagaauacuggcaucug

SEQ ID NO: 396 - RNA, 20 nt, Artificial Sequence
  Antisense oligonucleotide
  misc_feature (1)..(2): BNA scaffold modification
ctguagaauacuggcaucug

SEQ ID NO: 397 - RNA, 20 nt, Artificial Sequence
  Antisense oligonucleotide
  misc_feature (19)..(20): BNA scaffold modification
cuguagaauacuggcauctg

SEQ ID NO: 398 - RNA, 18 nt, Artificial Sequence
  Antisense oligonucleotide
guagaauacuggcaucug

SEQ ID NO: 399 - RNA, 18 nt, Artificial Sequence
  Antisense oligonucleotide
  misc_feature (1)..(1): BNA scaffold modification
guagaauacuggcaucug

SEQ ID NO: 400 - RNA, 18 nt, Artificial Sequence
  Antisense oligonucleotide
  misc_feature (18)..(18): BNA scaffold modification
guagaauacuggcaucug

SEQ ID NO: 401 - RNA, 18 nt, Artificial Sequence
  Antisense oligonucleotide
  misc_feature (1)..(1): BNA scaffold modification
  misc_feature (18)..(18): BNA scaffold modification
guagaauacuggcaucug

SEQ ID NO: 402 - RNA, 18 nt, Artificial Sequence
  Antisense oligonucleotide
  misc_feature (1)..(2): BNA scaffold modification
gtagaauacuggcaucug

SEQ ID NO: 403 - RNA, 18 nt, Artificial Sequence
  Antisense oligonucleotide
  misc_feature (17)..(18): BNA scaffold modification
guagaauacuggcauctg

SEQ ID NO: 404 - RNA, 16 nt, Artificial Sequence
  Antisense oligonucleotide
agaauacuggcaucug

SEQ ID NO: 405 - RNA, 16 nt, Artificial Sequence
  Antisense oligonucleotide
  misc_feature (1)..(1): BNA scaffold modification
agaauacuggcaucug

SEQ ID NO: 406 - RNA, 16 nt, Artificial Sequence
  Antisense oligonucleotide
  misc_feature (16)..(16): BNA scaffold modification
agaauacuggcaucug

SEQ ID NO: 407 - RNA, 16 nt, Artificial Sequence
  Antisense oligonucleotide
  misc_feature (1)..(1): BNA scaffold modification
  misc_feature (16)..(16): BNA scaffold modification
agaauacuggcaucug

SEQ ID NO: 408 - RNA, 16 nt, Artificial Sequence
  Antisense oligonucleotide
  misc_feature (1)..(2): BNA scaffold modification
agaauacuggcaucug

SEQ ID NO: 409 - RNA, 16 nt, Artificial Sequence
  Antisense oligonucleotide
  misc_feature (15)..(16): BNA scaffold modification
agaauacuggcauctg

SEQ ID NO: 410 - RNA, 18 nt, Artificial Sequence
  Antisense oligonucleotide
cuguagaauacuggcauc

SEQ ID NO: 411 - RNA, 18 nt, Artificial Sequence
  Antisense oligonucleotide
  misc_feature (1)..(1): BNA scaffold modification
cuguagaauacuggcauc

SEQ ID NO: 412 - RNA, 18 nt, Artificial Sequence
  Antisense oligonucleotide
  misc_feature (18)..(18): BNA scaffold modification
cuguagaauacuggcauc

SEQ ID NO: 413 - RNA, 18 nt, Artificial Sequence
  Antisense oligonucleotide
  misc_feature (1)..(1): BNA scaffold modification
  misc_feature (18)..(18): BNA scaffold modification
cuguagaauacuggcauc

SEQ ID NO: 414 - RNA, 18 nt, Artificial Sequence
  Antisense oligonucleotide
  misc_feature (1)..(2): BNA scaffold modification
ctguagaauacuggcauc

SEQ ID NO: 415 - RNA, 18 nt, Artificial Sequence
  Antisense oligonucleotide
  misc_feature (17)..(18): BNA scaffold modification
cuguagaauacuggcatc

SEQ ID NO: 416 - RNA, 21 nt, Artificial Sequence
  Antisense oligonucleotide
guuugcagaccuccugccacc

SEQ ID NO: 417 - RNA, 21 nt, Artificial Sequence
  Antisense oligonucleotide
  misc_feature (1)..(1): BNA scaffold modification
guuugcagaccuccugccacc

SEQ ID NO: 418 - RNA, 21 nt, Artificial Sequence
  Antisense oligonucleotide
  misc_feature (21)..(21): BNA scaffold modification
guuugcagaccuccugccacc

SEQ ID NO: 419 - RNA, 21 nt, Artificial Sequence
  Antisense oligonucleotide
  misc_feature (1)..(1): BNA scaffold modification
  misc_feature (21)..(21): BNA scaffold modification
guuugcagaccuccugccacc

SEQ ID NO: 420 - RNA, 21 nt, Artificial Sequence
  Antisense oligonucleotide
  misc_feature (1)..(2): BNA scaffold modification
gtuugcagaccuccugccacc

SEQ ID NO: 421 - RNA, 21 nt, Artificial Sequence
  Antisense oligonucleotide
  misc_feature (20)..(21): BNA scaffold modification
guuugcagaccuccugccacc

SEQ ID NO: 422 - RNA, 18 nt, Artificial Sequence
  Antisense oligonucleotide
guuugcagaccuccugcc

SEQ ID NO: 423 - RNA, 18 nt, Artificial Sequence
  Antisense oligonucleotide
  misc_feature (1)..(1): BNA scaffold modification
guuugcagaccuccugcc

SEQ ID NO: 424 - RNA, 18 nt, Artificial Sequence
  Antisense oligonucleotide
  misc_feature (18)..(18): BNA scaffold modification
guuugcagaccuccugcc

SEQ ID NO: 425 - RNA, 18 nt, Artificial Sequence
  Antisense oligonucleotide
  misc_feature (1)..(1): BNA scaffold modification
  misc_feature (18)..(18): BNA scaffold modification
guuugcagaccuccugcc

SEQ ID NO: 426 - RNA, 18 nt, Artificial Sequence
  Antisense oligonucleotide
  misc_feature (1)..(2): BNA scaffold modification
gtuugcagaccuccugcc

SEQ ID NO: 427 - RNA, 18 nt, Artificial Sequence
  Antisense oligonucleotide
  misc_feature (17)..(18): BNA scaffold modification
guuugcagaccuccugcc

SEQ ID NO: 428 - RNA, 16 nt, Artificial Sequence
  Antisense oligonucleotide
guuugcagaccuccug

SEQ ID NO: 429 - RNA, 16 nt, Artificial Sequence
  Antisense oligonucleotide
  misc_feature (1)..(1): BNA scaffold modification
guuugcagaccuccug

SEQ ID NO: 430 - RNA, 16 nt, Artificial Sequence
  Antisense oligonucleotide
  misc_feature (16)..(16): BNA scaffold modification
guuugcagaccuccug

SEQ ID NO: 431 - RNA, 16 nt, Artificial Sequence
  Antisense oligonucleotide
  misc_feature (1)..(1): BNA scaffold modification
  misc_feature (16)..(16): BNA scaffold modification
guuugcagaccuccug

SEQ ID NO: 432 - RNA, 16 nt, Artificial Sequence
  Antisense oligonucleotide
  misc_feature (1)..(2): BNA scaffold modification
gtuugcagaccuccug

SEQ ID NO: 433 - RNA, 16 nt, Artificial Sequence
  Antisense oligonucleotide
  misc_feature (15)..(16): BNA scaffold modification
guuugcagaccucctg

SEQ ID NO: 434 - RNA, 18 nt, Artificial Sequence
  Antisense oligonucleotide
ugcagaccuccugccacc

SEQ ID NO: 435 - RNA, 18 nt, Artificial Sequence
  Antisense oligonucleotide
  misc_feature (1)..(1): BNA scaffold modification
tgcagaccuccugccacc

SEQ ID NO: 436 - RNA, 18 nt, Artificial Sequence
  Antisense oligonucleotide
  misc_feature (18)..(18): BNA scaffold modification
ugcagaccuccugccacc

SEQ ID NO: 437 - RNA, 18 nt, Artificial Sequence
  Antisense oligonucleotide
  misc_feature (1)..(1): BNA scaffold modification
  misc_feature (18)..(18): BNA scaffold modification
tgcagaccuccugccacc

SEQ ID NO: 438 - RNA, 18 nt, Artificial Sequence
  Antisense oligonucleotide
  misc_feature (1)..(2): BNA scaffold modification
tgcagaccuccugccacc

SEQ ID NO: 439 - RNA, 18 nt, Artificial Sequence
  Antisense oligonucleotide
  misc_feature (17)..(18): BNA scaffold modification
ugcagaccuccugccacc

SEQ ID NO: 440 - RNA, 16 nt, Artificial Sequence
  Antisense oligonucleotide
cagaccuccugccacc

SEQ ID NO: 441 - RNA, 16 nt, Artificial Sequence
  Antisense oligonucleotide
  misc_feature (1)..(1): BNA scaffold modification
cagaccuccugccacc

SEQ ID NO: 442 - RNA, 16 nt, Artificial Sequence
  Antisense oligonucleotide
  misc_feature (16)..(16): BNA scaffold modification
cagaccuccugccacc

SEQ ID NO: 443 - RNA, 16 nt, Artificial Sequence
  Antisense oligonucleotide
  misc_feature (1)..(1): BNA scaffold modification
  misc_feature (16)..(16): BNA scaffold modification
cagaccuccugccacc

SEQ ID NO: 444 - RNA, 16 nt, Artificial Sequence
  Antisense oligonucleotide
  misc_feature (1)..(2): BNA scaffold modification
cagaccuccugccacc

SEQ ID NO: 445 - RNA, 16 nt, Artificial Sequence
  Antisense oligonucleotide
  misc_feature (15)..(16): BNA scaffold modification
cagaccuccugccacc

SEQ ID NO: 446 - RNA, 18 nt, Artificial Sequence
  Antisense oligonucleotide
uugcagaccuccugccac

SEQ ID NO: 447 - RNA, 18 nt, Artificial Sequence
  Antisense oligonucleotide
  misc_feature (1)..(1): BNA scaffold modification
tugcagaccuccugccac

SEQ ID NO: 448 - RNA, 18 nt, Artificial Sequence
  Antisense oligonucleotide
  misc_feature (18)..(18): BNA scaffold modification
uugcagaccuccugccac

SEQ ID NO: 449 - RNA, 18 nt, Artificial Sequence
  Antisense oligonucleotide
  misc_feature (1)..(1): BNA scaffold modification
  misc_feature (18)..(18): BNA scaffold modification
tugcagaccuccugccac

SEQ ID NO: 450 - RNA, 18 nt, Artificial Sequence
  Antisense oligonucleotide
  misc_feature (1)..(2): BNA scaffold modification
ttgcagaccuccugccac

SEQ ID NO: 451 - RNA, 18 nt, Artificial Sequence
  Antisense oligonucleotide
  misc_feature (17)..(18): BNA scaffold modification
uugcagaccuccugccac

SEQ ID NO: 452 - RNA, 20 nt, Artificial Sequence
  Antisense oligonucleotide
ucaaggaagauggcauuucu

SEQ ID NO: 453 - RNA, 20 nt, Artificial Sequence
  Antisense oligonucleotide
  misc_feature (1)..(1): BNA scaffold modification
tcaaggaagauggcauuucu

SEQ ID NO: 454 - RNA, 20 nt, Artificial Sequence
  Antisense oligonucleotide
  misc_feature (20)..(20): BNA scaffold modification
ucaaggaagauggcauuuct

SEQ ID NO: 455 - RNA, 20 nt, Artificial Sequence
  Antisense oligonucleotide
  misc_feature (1)..(1): BNA scaffold modification
  misc_feature (20)..(20): BNA scaffold modification
tcaaggaagauggcauuuct

SEQ ID NO: 456 - RNA, 20 nt, Artificial Sequence
  Antisense oligonucleotide
  misc_feature (1)..(2): BNA scaffold modification
tcaaggaagauggcauuucu

SEQ ID NO: 457 - RNA, 20 nt, Artificial Sequence
  Antisense oligonucleotide
  misc_feature (19)..(20): BNA scaffold modification
ucaaggaagauggcauuuct

SEQ ID NO: 458 - RNA, 22 nt, Artificial Sequence
  Antisense oligonucleotide
ucaaggaagauggcauuucuag

SEQ ID NO: 459 - RNA, 22 nt, Artificial Sequence
  Antisense oligonucleotide
  misc_feature (1)..(1): BNA scaffold modification
tcaaggaagauggcauuucuag

SEQ ID NO: 460 - RNA, 22 nt, Artificial Sequence
  Antisense oligonucleotide
  misc_feature (22)..(22): BNA scaffold modification
ucaaggaagauggcauuucuag

SEQ ID NO: 461 - RNA, 22 nt, Artificial Sequence
  Antisense oligonucleotide
  misc_feature (1)..(1): BNA scaffold modification
  misc_feature (22)..(22): BNA scaffold modification
tcaaggaagauggcauuucuag

SEQ ID NO: 462 - RNA, 22 nt, Artificial Sequence
  Antisense oligonucleotide
  misc_feature (1)..(2): BNA scaffold modification
tcaaggaagauggcauuucuag

SEQ ID NO: 463 - RNA, 22 nt, Artificial Sequence
  Antisense oligonucleotide
  misc_feature (21)..(22): BNA scaffold modification
ucaaggaagauggcauuucuag

SEQ ID NO: 464 - RNA, 18 nt, Artificial Sequence
  Antisense oligonucleotide
aaggaagauggcauuucu

SEQ ID NO: 465 - RNA, 18 nt, Artificial Sequence
  Antisense oligonucleotide
  misc_feature (1)..(1): BNA scaffold modification
aaggaagauggcauuucu

SEQ ID NO: 466 - RNA, 18 nt, Artificial Sequence
  Antisense oligonucleotide
  misc_feature (18)..(18): BNA scaffold modification
aaggaagauggcauuuct

SEQ ID NO: 467 - RNA, 18 nt, Artificial Sequence
  Antisense oligonucleotide
  misc_feature (1)..(1): BNA scaffold modification
  misc_feature (18)..(18): BNA scaffold modification
aaggaagauggcauuuct

SEQ ID NO: 468 - RNA, 18 nt, Artificial Sequence
  Antisense oligonucleotide
  misc_feature (1)..(2): BNA scaffold modification
aaggaagauggcauuucu

SEQ ID NO: 469 - RNA, 18 nt, Artificial Sequence
  Antisense oligonucleotide
  misc_feature (17)..(18): BNA scaffold modification
aaggaagauggcauuuct

SEQ ID NO: 470 - RNA, 16 nt, Artificial Sequence
  Antisense oligonucleotide
ggaagauggcauuucu

SEQ ID NO: 471 - RNA, 16 nt, Artificial Sequence
  Antisense oligonucleotide
  misc_feature (1)..(1): BNA scaffold modification
ggaagauggcauuucu

SEQ ID NO: 472 - RNA, 16 nt, Artificial Sequence
  Antisense oligonucleotide
  misc_feature (16)..(16): BNA scaffold modification
ggaagauggcauuuct

SEQ ID NO: 473 - RNA, 16 nt, Artificial Sequence
  Antisense oligonucleotide
  misc_feature (1)..(1): BNA scaffold modification
  misc_feature (16)..(16): BNA scaffold modification
ggaagauggcauuuct

SEQ ID NO: 474 - RNA, 16 nt, Artificial Sequence
  Antisense oligonucleotide
  misc_feature (1)..(2): BNA scaffold modification
ggaagauggcauuucu

SEQ ID NO: 475 - RNA, 16 nt, Artificial Sequence
  Antisense oligonucleotide
  misc_feature (15)..(16): BNA scaffold modification
ggaagauggcauuuct

SEQ ID NO: 476 - RNA, 18 nt, Artificial Sequence
  Antisense oligonucleotide
ucaaggaagauggcauuu

SEQ ID NO: 477 - RNA, 18 nt, Artificial Sequence
  Antisense oligonucleotide
  misc_feature (1)..(1): BNA scaffold modification
tcaaggaagauggcauuu

SEQ ID NO: 478 - RNA, 18 nt, Artificial Sequence
  Antisense oligonucleotide
  misc_feature (18)..(18): BNA scaffold modification
ucaaggaagauggcauut

SEQ ID NO: 479 - RNA, 18 nt, Artificial Sequence
  Antisense oligonucleotide
  misc_feature (1)..(1): BNA scaffold modification
  misc_feature (18)..(18): BNA scaffold modification
tcaaggaagauggcauut

SEQ ID NO: 480 - RNA, 18 nt, Artificial Sequence
  Antisense oligonucleotide
  misc_feature (1)..(2): BNA scaffold modification
tcaaggaagauggcauuu

SEQ ID NO: 481 - RNA, 18 nt, Artificial Sequence
  Antisense oligonucleotide
  misc_feature (17)..(18): BNA scaffold modification
ucaaggaagauggcautt

SEQ ID NO: 482 - RNA, 16 nt, Artificial Sequence
  Antisense oligonucleotide
ucaaggaagauggcau

SEQ ID NO: 483 - RNA, 16 nt, Artificial Sequence
  Antisense oligonucleotide
  misc_feature (1)..(1): BNA scaffold modification
tcaaggaagauggcau

SEQ ID NO: 484 - RNA, 16 nt, Artificial Sequence
  Antisense oligonucleotide
  misc_feature (16)..(16): BNA scaffold modification
ucaaggaagauggcat

SEQ ID NO: 485 - RNA, 16 nt, Artificial Sequence
  Antisense oligonucleotide
  misc_feature (1)..(1): BNA scaffold modification
  misc_feature (16)..(16): BNA scaffold modification
tcaaggaagauggcat

SEQ ID NO: 486 - RNA, 16 nt, Artificial Sequence
  Antisense oligonucleotide
  misc_feature (1)..(2): BNA scaffold modification
tcaaggaagauggcau

SEQ ID NO: 487 - RNA, 16 nt, Artificial Sequence
  Antisense oligonucleotide
  misc_feature (15)..(16): BNA scaffold modification
ucaaggaagauggcat

SEQ ID NO: 488 - RNA, 17 nt, Artificial Sequence
  Antisense oligonucleotide
uggcauuucuaguuugg

SEQ ID NO: 489 - RNA, 17 nt, Artificial Sequence
  Antisense oligonucleotide
  misc_feature (1)..(1): BNA scaffold modification
tggcauuucuaguuugg

SEQ ID NO: 490 - RNA, 17 nt, Artificial Sequence
  Antisense oligonucleotide
  misc_feature (17)..(17): BNA scaffold modification
uggcauuucuaguuugg

SEQ ID NO: 491 - RNA, 17 nt, Artificial Sequence
  Antisense oligonucleotide
  misc_feature (1)..(1): BNA scaffold modification
  misc_feature (17)..(17): BNA scaffold modification
tggcauuucuaguuugg

SEQ ID NO: 492 - RNA, 17 nt, Artificial Sequence
  Antisense oligonucleotide
  misc_feature (1)..(2): BNA scaffold modification
tggcauuucuaguuugg

SEQ ID NO: 493 - RNA, 17 nt, Artificial Sequence
  Antisense oligonucleotide
  misc_feature (16)..(17): BNA scaffold modification
uggcauuucuaguuugg

SEQ ID NO: 494 - RNA, 20 nt, Artificial Sequence
  Antisense oligonucleotide
agauggcauuucuaguuugg

SEQ ID NO: 495 - RNA, 20 nt, Artificial Sequence
  Antisense oligonucleotide
  misc_feature (1)..(1): BNA scaffold modification
agauggcauuucuaguuugg

SEQ ID NO: 496 - RNA, 20 nt, Artificial Sequence
  Antisense oligonucleotide
  misc_feature (20)..(20): BNA scaffold modification
agauggcauuucuaguuugg

SEQ ID NO: 497 - RNA, 20 nt, Artificial Sequence
  Antisense oligonucleotide
  misc_feature (1)..(1): BNA scaffold modification
  misc_feature (20)..(20): BNA scaffold modification
agauggcauuucuaguuugg

SEQ ID NO: 498 - RNA, 20 nt, Artificial Sequence
  Antisense oligonucleotide
  misc_feature (1)..(2): BNA scaffold modification
agauggcauuucuaguuugg

SEQ ID NO: 499 - RNA, 20 nt, Artificial Sequence
  Antisense oligonucleotide
  misc_feature (19)..(20): BNA scaffold modification
agauggcauuucuaguuugg

SEQ ID NO: 500 - RNA, 22 nt, Artificial Sequence
  Antisense oligonucleotide
caucaaggaagauggcauuucu

SEQ ID NO: 501 - RNA, 22 nt, Artificial Sequence
  Antisense oligonucleotide
  misc_feature (1)..(1): BNA scaffold modification
caucaaggaagauggcauuucu

SEQ ID NO: 502 - RNA, 22 nt, Artificial Sequence
  Antisense oligonucleotide
  misc_feature (22)..(22): BNA scaffold modification
caucaaggaagauggcauuuct

SEQ ID NO: 503 - RNA, 22 nt, Artificial Sequence
  Antisense oligonucleotide
  misc_feature (1)..(1): BNA scaffold modification
  misc_feature (22)..(22): BNA scaffold modification
caucaaggaagauggcauuuct

SEQ ID NO: 504 - RNA, 22 nt, Artificial Sequence
  Antisense oligonucleotide
  misc_feature (1)..(2): BNA scaffold modification
caucaaggaagauggcauuucu

SEQ ID NO: 505 - RNA, 22 nt, Artificial Sequence
  Antisense oligonucleotide
  misc_feature (21)..(22): BNA scaffold modification
caucaaggaagauggcauuuct

SEQ ID NO: 506 - RNA, 20 nt, Artificial Sequence
  Antisense oligonucleotide
caucaaggaagauggcauuu

SEQ ID NO: 507 - RNA, 20 nt, Artificial Sequence
  Antisense oligonucleotide
  misc_feature (1)..(1): BNA scaffold modification
caucaaggaagauggcauuu

SEQ ID NO: 508 - RNA, 20 nt, Artificial Sequence
  Antisense oligonucleotide
  misc_feature (20)..(20): BNA scaffold modification
caucaaggaagauggcauut

SEQ ID NO: 509 - RNA, 20 nt, Artificial Sequence
  Antisense oligonucleotide
  misc_feature (1)..(1): BNA scaffold modification
  misc_feature (20)..(20): BNA scaffold modification
caucaaggaagauggcauut

SEQ ID NO: 510 - RNA, 20 nt, Artificial Sequence
  Antisense oligonucleotide
  misc_feature (1)..(2): BNA scaffold modification
caucaaggaagauggcauuu

SEQ ID NO: 511 - RNA, 20 nt, Artificial Sequence
  Antisense oligonucleotide
  misc_feature (19)..(20): BNA scaffold modification
caucaaggaagauggcautt

SEQ ID NO: 512 - RNA, 18 nt, Artificial Sequence
  Antisense oligonucleotide
caucaaggaagauggcau

SEQ ID NO: 513 - RNA, 18 nt, Artificial Sequence
  Antisense oligonucleotide
  misc_feature (1)..(1): BNA scaffold modification
caucaaggaagauggcau

SEQ ID NO: 514 - RNA, 18 nt, Artificial Sequence
  Antisense oligonucleotide
  misc_feature (18)..(18): BNA scaffold modification
caucaaggaagauggcat

SEQ ID NO: 515 - RNA, 18 nt, Artificial Sequence
  Antisense oligonucleotide
  misc_feature (1)..(1): BNA scaffold modification
  misc_feature (18)..(18): BNA scaffold modification
caucaaggaagauggcat

SEQ ID NO: 516 - RNA, 18 nt, Artificial Sequence
  Antisense oligonucleotide
  misc_feature (1)..(2): BNA scaffold modification
caucaaggaagauggcau

SEQ ID NO: 517 - RNA, 18 nt, Artificial Sequence
  Antisense oligonucleotide
  misc_feature (17)..(18): BNA scaffold modification
caucaaggaagauggcat

SEQ ID NO: 518 - RNA, 25 nt, Artificial Sequence
  Antisense oligonucleotide
caacaucaaggaagauggcauuucu

SEQ ID NO: 519 - RNA, 25 nt, Artificial Sequence
  Antisense oligonucleotide
  misc_feature (1)..(1): BNA scaffold modification
caacaucaaggaagauggcauuucu

SEQ ID NO: 520 - RNA, 25 nt, Artificial Sequence
  Antisense oligonucleotide
  misc_feature (25)..(25): BNA scaffold modification
caacaucaaggaagauggcauuuct

SEQ ID NO: 521 - RNA, 25 nt, Artificial Sequence
  Antisense oligonucleotide
  misc_feature (1)..(1): BNA scaffold modification
  misc_feature (25)..(25): BNA scaffold modification
caacaucaaggaagauggcauuuct

SEQ ID NO: 522 - RNA, 25 nt, Artificial Sequence
  Antisense oligonucleotide
  misc_feature (1)..(2): BNA scaffold modification
caacaucaaggaagauggcauuucu

SEQ ID NO: 523 - RNA, 25 nt, Artificial Sequence
  Antisense oligonucleotide
  misc_feature (24)..(25): BNA scaffold modification
caacaucaaggaagauggcauuuct

SEQ ID NO: 524 - RNA, 16 nt, Artificial Sequence
  Antisense oligonucleotide
aaggaagauggcauuu

SEQ ID NO: 525 - RNA, 16 nt, Artificial Sequence
  Antisense oligonucleotide
  misc_feature (1)..(1): BNA scaffold modification
aaggaagauggcauuu

SEQ ID NO: 526 - RNA, 16 nt, Artificial Sequence
  Antisense oligonucleotide
  misc_feature (16)..(16): BNA scaffold modification
aaggaagauggcauut

SEQ ID NO: 527 - RNA, 16 nt, Artificial Sequence
  Antisense oligonucleotide
  misc_feature (1)..(1): BNA scaffold modification
  misc_feature (16)..(16): BNA scaffold modification
aaggaagauggcauut

SEQ ID NO: 528 - RNA, 16 nt, Artificial Sequence
  Antisense oligonucleotide
  misc_feature (1)..(2): BNA scaffold modification
aaggaagauggcauuu

SEQ ID NO: 529 - RNA, 16 nt, Artificial Sequence
  Antisense oligonucleotide
  misc_feature (15)..(16): BNA scaffold modification
aaggaagauggcautt

SEQ ID NO: 530 - RNA, 16 nt, Artificial Sequence
  Antisense oligonucleotide
aggaagauggcauuuc

SEQ ID NO: 531 - RNA, 16 nt, Artificial Sequence
  Antisense oligonucleotide
  misc_feature (1)..(1): BNA scaffold modification
aggaagauggcauuuc

SEQ ID NO: 532 - RNA, 16 nt, Artificial Sequence
  Antisense oligonucleotide
  misc_feature (16)..(16): BNA scaffold modification
aggaagauggcauuuc

SEQ ID NO: 533 - RNA, 16 nt, Artificial Sequence
  Antisense oligonucleotide
  misc_feature (1)..(1): BNA scaffold modification
  misc_feature (16)..(16): BNA scaffold modification
aggaagauggcauuuc

SEQ ID NO: 534 - RNA, 16 nt, Artificial Sequence
  Antisense oligonucleotide
  misc_feature (1)..(2): BNA scaffold modification
aggaagauggcauuuc

SEQ ID NO: 535 - RNA, 16 nt, Artificial Sequence
  Antisense oligonucleotide
  misc_feature (15)..(16): BNA scaffold modification
aggaagauggcauutc

SEQ ID NO: 536 - RNA, 19 nt, Artificial Sequence
  Antisense oligonucleotide
caaggaagauggcauuucu

SEQ ID NO: 537 - RNA, 19 nt, Artificial Sequence
  Antisense oligonucleotide
  misc_feature (1)..(1): BNA scaffold modification
caaggaagauggcauuucu

SEQ ID NO: 538 - RNA, 19 nt, Artificial Sequence
  Antisense oligonucleotide
  misc_feature (19)..(19): BNA scaffold modification
caaggaagauggcauuuct

SEQ ID NO: 539 - RNA, 19 nt, Artificial Sequence
  Antisense oligonucleotide
  misc_feature (1)..(1): BNA scaffold modification
  misc_feature (19)..(19): BNA scaffold modification
caaggaagauggcauuuct

SEQ ID NO: 540 - RNA, 19 nt, Artificial Sequence
  Antisense oligonucleotide
  misc_feature (1)..(2): BNA scaffold modification
caaggaagauggcauuucu

SEQ ID NO: 541 - RNA, 19 nt, Artificial Sequence
  Antisense oligonucleotide
  misc_feature (18)..(19): BNA scaffold modification
caaggaagauggcauuuct

SEQ ID NO: 542 - RNA, 17 nt, Artificial Sequence
  Antisense oligonucleotide
aggaagauggcauuucu

SEQ ID NO: 543 - RNA, 17 nt, Artificial Sequence
  Antisense oligonucleotide
  misc_feature (1)..(1): BNA scaffold modification
aggaagauggcauuucu

SEQ ID NO: 544 - RNA, 17 nt, Artificial Sequence
  Antisense oligonucleotide
  misc_feature (17)..(17): BNA scaffold modification
aggaagauggcauuuct

SEQ ID NO: 545 - RNA, 17 nt, Artificial Sequence
  Antisense oligonucleotide
  misc_feature (1)..(1): BNA scaffold modification
  misc_feature (17)..(17): BNA scaffold modification
aggaagauggcauuuct

SEQ ID NO: 546 - RNA, 17 nt, Artificial Sequence
  Antisense oligonucleotide
  misc_feature (1)..(2): BNA scaffold modification
aggaagauggcauuucu

SEQ ID NO: 547 - RNA, 17 nt, Artificial Sequence
  Antisense oligonucleotide
  misc_feature (16)..(17): BNA scaffold modification
aggaagauggcauuuct

SEQ ID NO: 548 - RNA, 23 nt, Artificial Sequence
  Antisense oligonucleotide
ccagagcagguaccuccaacauc

SEQ ID NO: 549 - RNA, 23 nt, Artificial Sequence
  Antisense oligonucleotide
  misc_feature (1)..(1): BNA scaffold modification
ccagagcagguaccuccaacauc

SEQ ID NO: 550 - RNA, 23 nt, Artificial Sequence
  Antisense oligonucleotide
  misc_feature (23)..(23): BNA scaffold modification
ccagagcagguaccuccaacauc

SEQ ID NO: 551 - RNA, 23 nt, Artificial Sequence
  Antisense oligonucleotide
  misc_feature (1)..(1): BNA scaffold modification
  misc_feature (23)..(23): BNA scaffold modification
ccagagcagguaccuccaacauc

SEQ ID NO: 552 - RNA, 23 nt, Artificial Sequence
  Antisense oligonucleotide
  misc_feature (1)..(2): BNA scaffold modification
ccagagcagguaccuccaacauc

SEQ ID NO: 553 - RNA, 23 nt, Artificial Sequence
  Antisense oligonucleotide
  misc_feature (22)..(23): BNA scaffold modification
ccagagcagguaccuccaacatc

SEQ ID NO: 554 - RNA, 18 nt, Artificial Sequence
  Antisense oligonucleotide
ccagagcagguaccucca

SEQ ID NO: 555 - RNA, 18 nt, Artificial Sequence
  Antisense oligonucleotide
  misc_feature (1)..(1): BNA scaffold modification
ccagagcagguaccucca

SEQ ID NO: 556 - RNA, 18 nt, Artificial Sequence
  Antisense oligonucleotide
  misc_feature (18)..(18): BNA scaffold modification
ccagagcagguaccucca

SEQ ID NO: 557 - RNA, 18 nt, Artificial Sequence
  Antisense oligonucleotide
  misc_feature (1)..(1): BNA scaffold modification
  misc_feature (18)..(18): BNA scaffold modification
ccagagcagguaccucca

SEQ ID NO: 558 - RNA, 18 nt, Artificial Sequence
  Antisense oligonucleotide
  misc_feature (1)..(2): BNA scaffold modification
ccagagcagguaccucca

SEQ ID NO: 559 - RNA, 18 nt, Artificial Sequence
  Antisense oligonucleotide
  misc_feature (17)..(18): BNA scaffold modification
ccagagcagguaccucca

SEQ ID NO: 560 - RNA, 23 nt, Artificial Sequence
  Antisense oligonucleotide
ccucugugauuuuauaacuugau

SEQ ID NO: 561 - RNA, 23 nt, Artificial Sequence
  Antisense oligonucleotide
  misc_feature (1)..(1): BNA scaffold modification
ccucugugauuuuauaacuugau

SEQ ID NO: 562 - RNA, 23 nt, Artificial Sequence
  Antisense oligonucleotide
  misc_feature (23)..(23): BNA scaffold modification
ccucugugauuuuauaacuugat

SEQ ID NO: 563 - RNA, 23 nt, Artificial Sequence
  Antisense oligonucleotide
  misc_feature (1)..(1): BNA scaffold modification
  misc_feature (23)..(23): BNA scaffold modification
ccucugugauuuuauaacuugat

SEQ ID NO: 564 - RNA, 23 nt, Artificial Sequence
  Antisense oligonucleotide
  misc_feature (1)..(2): BNA scaffold modification
ccucugugauuuuauaacuugau

SEQ ID NO: 565 - RNA, 23 nt, Artificial Sequence
  Antisense oligonucleotide
  misc_feature (22)..(23): BNA scaffold modification
ccucugugauuuuauaacuugat

SEQ ID NO: 566 - RNA, 17 nt, Artificial Sequence
  Antisense oligonucleotide
ucacccaccaucacccu

SEQ ID NO: 567 - RNA, 17 nt, Artificial Sequence
  Antisense oligonucleotide
  misc_feature (1)..(1): BNA scaffold modification
tcacccaccaucacccu

SEQ ID NO: 568 - RNA, 17 nt, Artificial Sequence
  Antisense oligonucleotide
  misc_feature (17)..(17): BNA scaffold modification
ucacccaccaucaccct

SEQ ID NO: 569 - RNA, 17 nt, Artificial Sequence
  Antisense oligonucleotide
  misc_feature (1)..(1): BNA scaffold modification
  misc_feature (17)..(17): BNA scaffold modification
tcacccaccaucaccct

SEQ ID NO: 570 - RNA, 17 nt, Artificial Sequence
  Antisense oligonucleotide
  misc_feature (1)..(2): BNA scaffold modification
tcacccaccaucacccu

SEQ ID NO: 571 - RNA, 17 nt, Artificial Sequence
  Antisense oligonucleotide
  misc_feature (16)..(17): BNA scaffold modification
ucacccaccaucaccct

SEQ ID NO: 572 - RNA, 20 nt, Artificial Sequence
  Antisense oligonucleotide
ugauauccucaaggucaccc

SEQ ID NO: 573 - RNA, 20 nt, Artificial Sequence
  Antisense oligonucleotide
  misc_feature (1)..(1): BNA scaffold modification
ugauauccucaaggucaccc

SEQ ID NO: 574 - RNA, 20 nt, Artificial Sequence
  Antisense oligonucleotide
  misc_feature (20)..(20): BNA scaffold modification
tgauauccucaaggucaccc

SEQ ID NO: 575 - RNA, 20 nt, Artificial Sequence
  Antisense oligonucleotide
  misc_feature (1)..(1): BNA scaffold modification
  misc_feature (20)..(20): BNA scaffold modification
tgauauccucaaggucaccc

SEQ ID NO: 576 - RNA, 20 nt, Artificial Sequence
  Antisense oligonucleotide
  misc_feature (1)..(2): BNA scaffold modification
tgauauccucaaggucaccc

SEQ ID NO: 577 - RNA, 20 nt, Artificial Sequence
  Antisense oligonucleotide
  misc_feature (19)..(20): BNA scaffold modification
ugauauccucaaggucaccc

SEQ ID NO: 578 - RNA, 22 nt, Artificial Sequence
  Antisense oligonucleotide
cugcuugaugaucaucucguug

SEQ ID NO: 579 - RNA, 22 nt, Artificial Sequence
  Antisense oligonucleotide
  misc_feature (1)..(1): BNA scaffold modification
cugcuugaugaucaucucguug

SEQ ID NO: 580 - RNA, 22 nt, Artificial Sequence
  Antisense oligonucleotide
  misc_feature (22)..(22): BNA scaffold modification
cugcuugaugaucaucucguug

SEQ ID NO: 581 - RNA, 22 nt, Artificial Sequence
  Antisense oligonucleotide
  misc_feature (1)..(1): BNA scaffold modification
  misc_feature (22)..(22): BNA scaffold modification
cugcuugaugaucaucucguug

SEQ ID NO: 582 - RNA, 22 nt, Artificial Sequence
  Antisense oligonucleotide
  misc_feature (1)..(2): BNA scaffold modification
ctgcuugaugaucaucucguug

SEQ ID NO: 583 - RNA, 22 nt, Artificial Sequence
  Antisense oligonucleotide
  misc_feature (21)..(22): BNA scaffold modification
cugcuugaugaucaucucgutg

SEQ ID NO: 584 - RNA, 18 nt, Artificial Sequence
  Antisense oligonucleotide
cugcuugaugaucaucuc

SEQ ID NO: 585 - RNA, 18 nt, Artificial Sequence
  Antisense oligonucleotide
  misc_feature (1)..(1): BNA scaffold modification
cugcuugaugaucaucuc

SEQ ID NO: 586 - RNA, 18 nt, Artificial Sequence
  Antisense oligonucleotide
  misc_feature (18)..(18): BNA scaffold modification
cugcuugaugaucaucuc

SEQ ID NO: 587 - RNA, 18 nt, Artificial Sequence
  Antisense oligonucleotide
  misc_feature (1)..(1): BNA scaffold modification
  misc_feature (18)..(18): BNA scaffold modification
cugcuugaugaucaucuc

SEQ ID NO: 588 - RNA, 18 nt, Artificial Sequence
  Antisense oligonucleotide
  misc_feature (1)..(2): BNA scaffold modification
ctgcuugaugaucaucuc

SEQ ID NO: 589 - RNA, 18 nt, Artificial Sequence
  Antisense oligonucleotide
  misc_feature (17)..(18): BNA scaffold modification
cugcuugaugaucauctc

SEQ ID NO: 590 - RNA, 18 nt, Artificial Sequence
  Antisense oligonucleotide
gguaaguucuguccaagc

SEQ ID NO: 591 - RNA, 18 nt, Artificial Sequence
  Antisense oligonucleotide
  misc_feature (1)..(1): BNA scaffold modification
gguaaguucuguccaagc

SEQ ID NO: 592 - RNA, 18 nt, Artificial Sequence
  Antisense oligonucleotide
  misc_feature (18)..(18): BNA scaffold modification
gguaaguucuguccaagc

SEQ ID NO: 593 - RNA, 18 nt, Artificial Sequence
  Antisense oligonucleotide
  misc_feature (1)..(1): BNA scaffold modification
  misc_feature (18)..(18): BNA scaffold modification
gguaaguucuguccaagc

SEQ ID NO: 594 - RNA, 18 nt, Artificial Sequence
  Antisense oligonucleotide
  misc_feature (1)..(2): BNA scaffold modification
gguaaguucuguccaagc

SEQ ID NO: 595 - RNA, 18 nt, Artificial Sequence
  Antisense oligonucleotide
  misc_feature (17)..(18): BNA scaffold modification
gguaaguucuguccaagc

SEQ ID NO: 596 - RNA, 16 nt, Artificial Sequence
  Antisense oligonucleotide
guaaguucuguccaag

SEQ ID NO: 597 - RNA, 16 nt, Artificial Sequence
  Antisense oligonucleotide
  misc_feature (1)..(1): BNA scaffold modification
guaaguucuguccaag

SEQ ID NO: 598 - RNA, 16 nt, Artificial Sequence
  Antisense oligonucleotide
  misc_feature (16)..(16): BNA scaffold modification
guaaguucuguccaag

SEQ ID NO: 599 - RNA, 16 nt, Artificial Sequence
  Antisense oligonucleotide
  misc_feature (1)..(1): BNA scaffold modification
  misc_feature (16)..(16): BNA scaffold modification
guaaguucuguccaag

SEQ ID NO: 600 - RNA, 16 nt, Artificial Sequence
  Antisense oligonucleotide
  misc_feature (1)..(2): BNA scaffold modification
gtaaguucuguccaag

SEQ ID NO: 601 - RNA, 16 nt, Artificial Sequence
  Antisense oligonucleotide
  misc_feature (15)..(16): BNA scaffold modification
guaaguucuguccaag

SEQ ID NO: 602 - RNA, 19 nt, Artificial Sequence
  Antisense oligonucleotide
guuuccuuaguaaccacag

SEQ ID NO: 603 - RNA, 19 nt, Artificial Sequence
  Antisense oligonucleotide
  misc_feature (1)..(1): BNA scaffold modification
guuuccuuaguaaccacag

SEQ ID NO: 604 - RNA, 19 nt, Artificial Sequence
  Antisense oligonucleotide
  misc_feature (19)..(19): BNA scaffold modification
guuuccuuaguaaccacag

SEQ ID NO: 605 - RNA, 19 nt, Artificial Sequence
  Antisense oligonucleotide
  misc_feature (1)..(1): BNA scaffold modification
  misc_feature (19)..(19): BNA scaffold modification
guuuccuuaguaaccacag

SEQ ID NO: 606 - RNA, 19 nt, Artificial Sequence
  Antisense oligonucleotide
  misc_feature (1)..(2): BNA scaffold modification
gtuuccuuaguaaccacag

SEQ ID NO: 607 - RNA, 19 nt, Artificial Sequence
  Antisense oligonucleotide
  misc_feature (18)..(19): BNA scaffold modification
guuuccuuaguaaccacag

SEQ ID NO: 608 - RNA, 17 nt, Artificial Sequence
  Antisense oligonucleotide
guuuccuuaguaaccac

SEQ ID NO: 609 - RNA, 17 nt, Artificial Sequence
  Antisense oligonucleotide
  misc_feature (1)..(1): BNA scaffold modification
guuuccuuaguaaccac

SEQ ID NO: 610 - RNA, 17 nt, Artificial Sequence
  Antisense oligonucleotide
  misc_feature (17)..(17): BNA scaffold modification
guuuccuuaguaaccac

SEQ ID NO: 611 - RNA, 17 nt, Artificial Sequence
  Antisense oligonucleotide
  misc_feature (1)..(1): BNA scaffold modification
  misc_feature (17)..(17): BNA scaffold modification
guuuccuuaguaaccac

SEQ ID NO: 612 - RNA, 17 nt, Artificial Sequence
  Antisense oligonucleotide
  misc_feature (1)..(2): BNA scaffold modification
gtuuccuuaguaaccac

SEQ ID NO: 613 - RNA, 17 nt, Artificial Sequence
  Antisense oligonucleotide
  misc_feature (16)..(17): BNA scaffold modification
guuuccuuaguaaccac

SEQ ID NO: 614 - RNA, 25 nt, Artificial Sequence
  Antisense oligonucleotide
cucuugauugcuggucuuguuuuuc

SEQ ID NO: 615 - RNA, 25 nt, Artificial Sequence
  Antisense oligonucleotide
  misc_feature (1)..(1): BNA scaffold modification
cucuugauugcuggucuuguuuuuc

SEQ ID NO: 616 - RNA, 25 nt, Artificial Sequence
  Antisense oligonucleotide
  misc_feature (25)..(25): BNA scaffold modification
cucuugauugcuggucuuguuuuuc

SEQ ID NO: 617 - RNA, 25 nt, Artificial Sequence
  Antisense oligonucleotide
  misc_feature (1)..(1): BNA scaffold modification
  misc_feature (25)..(25): BNA scaffold modification
cucuugauugcuggucuuguuuuuc

SEQ ID NO: 618 - RNA, 25 nt, Artificial Sequence
  Antisense oligonucleotide
  misc_feature (1)..(2): BNA scaffold modification
ctcuugauugcuggucuuguuuuuc

SEQ ID NO: 619 - RNA, 25 nt, Artificial Sequence
  Antisense oligonucleotide
  misc_feature (24)..(25): BNA scaffold modification
cucuugauugcuggucuuguuuutc

SEQ ID NO: 620 - RNA, 22 nt, Artificial Sequence
  Antisense oligonucleotide
cucuugauugcuggucuuguuu

SEQ ID NO: 621 - RNA, 22 nt, Artificial Sequence
  Antisense oligonucleotide
  misc_feature (1)..(1): BNA scaffold modification
cucuugauugcuggucuuguuu

SEQ ID NO: 622 - RNA, 22 nt, Artificial Sequence
  Antisense oligonucleotide
  misc_feature (22)..(22): BNA scaffold modification
cucuugauugcuggucuuguut

SEQ ID NO: 623 - RNA, 22 nt, Artificial Sequence
  Antisense oligonucleotide
  misc_feature (1)..(1): BNA scaffold modification
  misc_feature (22)..(22): BNA scaffold modification
cucuugauugcuggucuuguut

SEQ ID NO: 624 - RNA, 22 nt, Artificial Sequence
  Antisense oligonucleotide
  misc_feature (1)..(2): BNA scaffold modification
ctcuugauugcuggucuuguuu

SEQ ID NO: 625 - RNA, 22 nt, Artificial Sequence
  Antisense oligonucleotide
  misc_feature (21)..(22): BNA scaffold modification
cucuugauugcuggucuugutt

SEQ ID NO: 626 - RNA, 20 nt, Artificial Sequence
  Antisense oligonucleotide
cucuugauugcuggucuugu

SEQ ID NO: 627 - RNA, 20 nt, Artificial Sequence
  Antisense oligonucleotide
  misc_feature (1)..(1): BNA scaffold modification
cucuugauugcuggucuugu

SEQ ID NO: 628 - RNA, 20 nt, Artificial Sequence
  Antisense oligonucleotide
  misc_feature (20)..(20): BNA scaffold modification
cucuugauugcuggucuugt

SEQ ID NO: 629 - RNA, 20 nt, Artificial Sequence
  Antisense oligonucleotide
  misc_feature (1)..(1): BNA scaffold modification
  misc_feature (20)..(20): BNA scaffold modification
cucuugauugcuggucuugt

SEQ ID NO: 630 - RNA, 20 nt, Artificial Sequence
  Antisense oligonucleotide
  misc_feature (1)..(2): BNA scaffold modification
ctcuugauugcuggucuugu

SEQ ID NO: 631 - RNA, 20 nt, Artificial Sequence
  Antisense oligonucleotide
  misc_feature (19)..(20): BNA scaffold modification
cucuugauugcuggucuugt

SEQ ID NO: 632 - RNA, 18 nt, Artificial Sequence
  Antisense oligonucleotide
cucuugauugcuggucuu

SEQ ID NO: 633 - RNA, 18 nt, Artificial Sequence
  Antisense oligonucleotide
  misc_feature (1)..(1): BNA scaffold modification
cucuugauugcuggucuu

SEQ ID NO: 634 - RNA, 18 nt, Artificial Sequence
  Antisense oligonucleotide
  misc_feature (18)..(18): BNA scaffold modification
cucuugauugcuggucut

SEQ ID NO: 635 - RNA, 18 nt, Artificial Sequence
  Antisense oligonucleotide
  misc_feature (1)..(1): BNA scaffold modification
  misc_feature (18)..(18): BNA scaffold modification
cucuugauugcuggucut

SEQ ID NO: 636 - RNA, 18 nt, Artificial Sequence
  Antisense oligonucleotide
  misc_feature (1)..(2): BNA scaffold modification
ctcuugauugcuggucuu

SEQ ID NO: 637 - RNA, 18 nt, Artificial Sequence
  Antisense oligonucleotide
  misc_feature (17)..(18): BNA scaffold modification
cucuugauugcugguctt

SEQ ID NO: 638 - RNA, 16 nt, Artificial Sequence
  Antisense oligonucleotide
cucuugauugcugguc

SEQ ID NO: 639 - RNA, 16 nt, Artificial Sequence
  Antisense oligonucleotide
  misc_feature (1)..(1): BNA scaffold modification
cucuugauugcugguc

SEQ ID NO: 640 - RNA, 16 nt, Artificial Sequence
  Antisense oligonucleotide
  misc_feature (16)..(16): BNA scaffold modification
cucuugauugcugguc

SEQ ID NO: 641 - RNA, 16 nt, Artificial Sequence
  Antisense oligonucleotide
  misc_feature (1)..(1): BNA scaffold modification
  misc_feature (16)..(16): BNA scaffold modification
cucuugauugcugguc

SEQ ID NO: 642 - RNA, 16 nt, Artificial Sequence
  Antisense oligonucleotide
  misc_feature (1)..(2): BNA scaffold modification
ctcuugauugcugguc

SEQ ID NO: 643 - RNA, 16 nt, Artificial Sequence
  Antisense oligonucleotide
  misc_feature (15)..(16): BNA scaffold modification
cucuugauugcuggtc

SEQ ID NO: 644 - RNA, 22 nt, Artificial Sequence
  Antisense oligonucleotide
uugauugcuggucuuguuuuuc

SEQ ID NO: 645 - RNA, 22 nt, Artificial Sequence
  Antisense oligonucleotide
  misc_feature (1)..(1): BNA scaffold modification
tugauugcuggucuuguuuuuc

SEQ ID NO: 646 - RNA, 22 nt, Artificial Sequence
  Antisense oligonucleotide
  misc_feature (22)..(22): BNA scaffold modification
uugauugcuggucuuguuuuuc

SEQ ID NO: 647 - RNA, 22 nt, Artificial Sequence
  Antisense oligonucleotide
  misc_feature (1)..(1): BNA scaffold modification
  misc_feature (22)..(22): BNA scaffold modification
tugauugcuggucuuguuuuuc

SEQ ID NO: 648 - RNA, 22 nt, Artificial Sequence
  Antisense oligonucleotide
  misc_feature (1)..(2): BNA scaffold modification
ttgauugcuggucuuguuuuuc

SEQ ID NO: 649 - RNA, 22 nt, Artificial Sequence
  Antisense oligonucleotide
  misc_feature (21)..(22): BNA scaffold modification
uugauugcuggucuuguuuutc

SEQ ID NO: 650 - RNA, 20 nt, Artificial Sequence
  Antisense oligonucleotide
gauugcuggucuuguuuuuc

SEQ ID NO: 651 - RNA, 20 nt, Artificial Sequence
  Antisense oligonucleotide
  misc_feature (1)..(1): BNA scaffold modification
gauugcuggucuuguuuuuc

SEQ ID NO: 652 - RNA, 20 nt, Artificial Sequence
  Antisense oligonucleotide
  misc_feature (20)..(20): BNA scaffold modification
gauugcuggucuuguuuuuc

SEQ ID NO: 653 - RNA, 20 nt, Artificial Sequence
  Antisense oligonucleotide
  misc_feature (1)..(1): BNA scaffold modification
  misc_feature (20)..(20): BNA scaffold modification
gauugcuggucuuguuuuuc

SEQ ID NO: 654 - RNA, 20 nt, Artificial Sequence
  Antisense oligonucleotide
  misc_feature (1)..(2): BNA scaffold modification
gauugcuggucuuguuuuuc

SEQ ID NO: 655 - RNA, 20 nt, Artificial Sequence
  Antisense oligonucleotide
  misc_feature (19)..(20): BNA scaffold modification
gauugcuggucuuguuuutc

SEQ ID NO: 656 - RNA, 18 nt, Artificial Sequence
  Antisense oligonucleotide
uugcuggucuuguuuuuc

SEQ ID NO: 657 - RNA, 18 nt, Artificial Sequence
  Antisense oligonucleotide
  misc_feature (1)..(1): BNA scaffold modification
tugcuggucuuguuuuuc

SEQ ID NO: 658 - RNA, 18 nt, Artificial Sequence
  Antisense oligonucleotide
  misc_feature (18)..(18): BNA scaffold modification
uugcuggucuuguuuuuc

SEQ ID NO: 659 - RNA, 18 nt, Artificial Sequence
  Antisense oligonucleotide
  misc_feature (1)..(1): BNA scaffold modification
  misc_feature (18)..(18): BNA scaffold modification
tugcuggucuuguuuuuc

SEQ ID NO: 660 - RNA, 18 nt, Artificial Sequence
  Antisense oligonucleotide
  misc_feature (1)..(2): BNA scaffold modification
ttgcuggucuuguuuuuc

SEQ ID NO: 661 - RNA, 18 nt, Artificial Sequence
  Antisense oligonucleotide
  misc_feature (17)..(18): BNA scaffold modification
uugcuggucuuguuuutc

SEQ ID NO: 662 - RNA, 16 nt, Artificial Sequence
  Antisense oligonucleotide
gcuggucuuguuuuuc

SEQ ID NO: 663 - RNA, 16 nt, Artificial Sequence
  Antisense oligonucleotide
  misc_feature (1)..(1): BNA scaffold modification
gcuggucuuguuuuuc

SEQ ID NO: 664 - RNA, 16 nt, Artificial Sequence
  Antisense oligonucleotide
  misc_feature (16)..(16): BNA scaffold modification
gcuggucuuguuuuuc

SEQ ID NO: 665 - RNA, 16 nt, Artificial Sequence
  Antisense oligonucleotide
  misc_feature (1)..(1): BNA scaffold modification
  misc_feature (16)..(16): BNA scaffold modification
gcuggucuuguuuuuc

SEQ ID NO: 666 - RNA, 16 nt, Artificial Sequence
  Antisense oligonucleotide
  misc_feature (1)..(2): BNA scaffold modification
gcuggucuuguuuuuc

SEQ ID NO: 667 - RNA, 16 nt, Artificial Sequence
  Antisense oligonucleotide
  misc_feature (15)..(16): BNA scaffold modification
gcuggucuuguuuutc

SEQ ID NO: 668 - RNA, 18 nt, Artificial Sequence
  Antisense oligonucleotide
uugauugcuggucuuguu

SEQ ID NO: 669 - RNA, 18 nt, Artificial Sequence
  Antisense oligonucleotide
  misc_feature (1)..(1): BNA scaffold modification
tugauugcuggucuuguu

SEQ ID NO: 670 - RNA, 18 nt, Artificial Sequence
  Antisense oligonucleotide
  misc_feature (18)..(18): BNA scaffold modification
uugauugcuggucuugut

SEQ ID NO: 671 - RNA, 18 nt, Artificial Sequence
  Antisense oligonucleotide
  misc_feature (1)..(1): BNA scaffold modification
  misc_feature (18)..(18): BNA scaffold modification
tugauugcuggucuugut

SEQ ID NO: 672 - RNA, 18 nt, Artificial Sequence
  Antisense oligonucleotide
  misc_feature (1)..(2): BNA scaffold modification
ttgauugcuggucuuguu

SEQ ID NO: 673 - RNA, 18 nt, Artificial Sequence
  Antisense oligonucleotide
  misc_feature (17)..(18): BNA scaffold modification
uugauugcuggucuugtt

SEQ ID NO: 674 - RNA, 22 nt, Artificial Sequence
  Antisense oligonucleotide
gguaaugaguucuuccaacugg

SEQ ID NO: 675 - RNA, 22 nt, Artificial Sequence
  Antisense oligonucleotide
  misc_feature (1)..(1): BNA scaffold modification
gguaaugaguucuuccaacugg

SEQ ID NO: 676 - RNA, 22 nt, Artificial Sequence
  Antisense oligonucleotide
  misc_feature (22)..(22): BNA scaffold modification
gguaaugaguucuuccaacugg

SEQ ID NO: 677 - RNA, 22 nt, Artificial Sequence
  Antisense oligonucleotide
  misc_feature (1)..(1): BNA scaffold modification
  misc_feature (22)..(22): BNA scaffold modification
gguaaugaguucuuccaacugg

SEQ ID NO: 678 - RNA, 22 nt, Artificial Sequence
  Antisense oligonucleotide
  misc_feature (1)..(2): BNA scaffold modification
gguaaugaguucuuccaacugg

SEQ ID NO: 679 - RNA, 22 nt, Artificial Sequence
  Antisense oligonucleotide
  misc_feature (21)..(22): BNA scaffold modification
gguaaugaguucuuccaacugg

SEQ ID NO: 680 - RNA, 20 nt, Artificial Sequence
  Antisense oligonucleotide
gguaaugaguucuuccaacu

SEQ ID NO: 681 - RNA, 20 nt, Artificial Sequence
  Antisense oligonucleotide
  misc_feature (1)..(1): BNA scaffold modification
gguaaugaguucuuccaacu

SEQ ID NO: 682 - RNA, 20 nt, Artificial Sequence
  Antisense oligonucleotide
  misc_feature (20)..(20): BNA scaffold modification
gguaaugaguucuuccaact

SEQ ID NO: 683 - RNA, 20 nt, Artificial Sequence
  Antisense oligonucleotide
  misc_feature (1)..(1): BNA scaffold modification
  misc_feature (20)..(20): BNA scaffold modification
gguaaugaguucuuccaact

SEQ ID NO: 684 - RNA, 20 nt, Artificial Sequence
  Antisense oligonucleotide
  misc_feature (1)..(2): BNA scaffold modification
gguaaugaguucuuccaacu

SEQ ID NO: 685 - RNA, 20 nt, Artificial Sequence
  Antisense oligonucleotide
  misc_feature (19)..(20): BNA scaffold modification
gguaaugaguucuuccaact

SEQ ID NO: 686 - RNA, 18 nt, Artificial Sequence
  Antisense oligonucleotide
gguaaugaguucuuccaa

SEQ ID NO: 687 - RNA, 18 nt, Artificial Sequence
  Antisense oligonucleotide
  misc_feature (1)..(1): BNA scaffold modification
gguaaugaguucuuccaa

SEQ ID NO: 688 - RNA, 18 nt, Artificial Sequence
  Antisense oligonucleotide
  misc_feature (18)..(18): BNA scaffold modification
gguaaugaguucuuccaa

SEQ ID NO: 689 - RNA, 18 nt, Artificial Sequence
  Antisense oligonucleotide
  misc_feature (1)..(1): BNA scaffold modification
  misc_feature (18)..(18): BNA scaffold modification
gguaaugaguucuuccaa

SEQ ID NO: 690 - RNA, 18 nt, Artificial Sequence
  Antisense oligonucleotide
  misc_feature (1)..(2): BNA scaffold modification
gguaaugaguucuuccaa

SEQ ID NO: 691 - RNA, 18 nt, Artificial Sequence
  Antisense oligonucleotide
  misc_feature (17)..(18): BNA scaffold modification
gguaaugaguucuuccaa

SEQ ID NO: 692 - RNA, 16 nt, Artificial Sequence
  Antisense oligonucleotide
gguaaugaguucuucc

SEQ ID NO: 693 - RNA, 16 nt, Artificial Sequence
  Antisense oligonucleotide
  misc_feature (1)..(1): BNA scaffold modification
gguaaugaguucuucc

SEQ ID NO: 694 - RNA, 16 nt, Artificial Sequence
  Antisense oligonucleotide
  misc_feature (16)..(16): BNA scaffold modification
gguaaugaguucuucc

SEQ ID NO: 695 - RNA, 16 nt, Artificial Sequence
  Antisense oligonucleotide
  misc_feature (1)..(1): BNA scaffold modification
  misc_feature (16)..(16): BNA scaffold modification
gguaaugaguucuucc

SEQ ID NO: 696 - RNA, 16 nt, Artificial Sequence
  Antisense oligonucleotide
  misc_feature (1)..(2): BNA scaffold modification
gguaaugaguucuucc

SEQ ID NO: 697 - RNA, 16 nt, Artificial Sequence
  Antisense oligonucleotide
  misc_feature (15)..(16): BNA scaffold modification
gguaaugaguucuucc

SEQ ID NO: 698 - RNA, 20 nt, Artificial Sequence
  Antisense oligonucleotide
uaaugaguucuuccaacugg

SEQ ID NO: 699 - RNA, 20 nt, Artificial Sequence
  Antisense oligonucleotide
  misc_feature (1)..(1): BNA scaffold modification
taaugaguucuuccaacugg

SEQ ID NO: 700 - RNA, 20 nt, Artificial Sequence
  Antisense oligonucleotide
  misc_feature (20)..(20): BNA scaffold modification
uaaugaguucuuccaacugg

SEQ ID NO: 701 - RNA, 20 nt, Artificial Sequence
  Antisense oligonucleotide
  misc_feature (1)..(1): BNA scaffold modification
  misc_feature (20)..(20): BNA scaffold modification
taaugaguucuuccaacugg

SEQ ID NO: 702 - RNA, 20 nt, Artificial Sequence
  Antisense oligonucleotide
  misc_feature (1)..(2): BNA scaffold modification
taaugaguucuuccaacugg

SEQ ID NO: 703 - RNA, 20 nt, Artificial Sequence
  Antisense oligonucleotide
  misc_feature (19)..(20): BNA scaffold modification
uaaugaguucuuccaacugg

SEQ ID NO: 704 - RNA, 18 nt, Artificial Sequence
  Antisense oligonucleotide
augaguucuuccaacugg

SEQ ID NO: 705 - RNA, 18 nt, Artificial Sequence
  Antisense oligonucleotide
  misc_feature (1)..(1): BNA scaffold modification
augaguucuuccaacugg

SEQ ID NO: 706 - RNA, 18 nt, Artificial Sequence
  Antisense oligonucleotide
  misc_feature (18)..(18): BNA scaffold modification
augaguucuuccaacugg

SEQ ID NO: 707 - RNA, 18 nt, Artificial Sequence
  Antisense oligonucleotide
  misc_feature (1)..(1): BNA scaffold modification
  misc_feature (18)..(18): BNA scaffold modification
augaguucuuccaacugg

SEQ ID NO: 708 - RNA, 18 nt, Artificial Sequence
  Antisense oligonucleotide
  misc_feature (1)..(2): BNA scaffold modification
atgaguucuuccaacugg

SEQ ID NO: 709 - RNA, 18 nt, Artificial Sequence
  Antisense oligonucleotide
  misc_feature (17)..(18): BNA scaffold modification
augaguucuuccaacugg

SEQ ID NO: 710 - RNA, 16 nt, Artificial Sequence
  Antisense oligonucleotide
gaguucuuccaacugg

SEQ ID NO: 711 - RNA, 16 nt, Artificial Sequence
  Antisense oligonucleotide
  misc_feature (1)..(1): BNA scaffold modification
gaguucuuccaacugg

SEQ ID NO: 712 - RNA, 16 nt, Artificial Sequence
  Antisense oligonucleotide
  misc_feature (16)..(16): BNA scaffold modification
gaguucuuccaacugg

SEQ ID NO: 713 - RNA, 16 nt, Artificial Sequence
  Antisense oligonucleotide
  misc_feature (1)..(1): BNA scaffold modification
  misc_feature (16)..(16): BNA scaffold modification
gaguucuuccaacugg

SEQ ID NO: 714 - RNA, 16 nt, Artificial Sequence
  Antisense oligonucleotide
  misc_feature (1)..(2): BNA scaffold modification
gaguucuuccaacugg

SEQ ID NO: 715 - RNA, 16 nt, Artificial Sequence
  Antisense oligonucleotide
  misc_feature (15)..(16): BNA scaffold modification
gaguucuuccaacugg

SEQ ID NO: 716 - RNA, 18 nt, Artificial Sequence
  Antisense oligonucleotide
uaaugaguucuuccaacu

SEQ ID NO: 717 - RNA, 18 nt, Artificial Sequence
  Antisense oligonucleotide
  misc_feature (1)..(1): BNA scaffold modification
taaugaguucuuccaacu

SEQ ID NO: 718 - RNA, 18 nt, Artificial Sequence
  Antisense oligonucleotide
  misc_feature (18)..(18): BNA scaffold modification
uaaugaguucuuccaact

SEQ ID NO: 719 - RNA, 18 nt, Artificial Sequence
  Antisense oligonucleotide
  misc_feature (1)..(1): BNA scaffold modification
  misc_feature (18)..(18): BNA scaffold modification
taaugaguucuuccaact

SEQ ID NO: 720 - RNA, 18 nt, Artificial Sequence
  Antisense oligonucleotide
  misc_feature (1)..(2): BNA scaffold modification
taaugaguucuuccaacu

SEQ ID NO: 721 - RNA, 18 nt, Artificial Sequence
  Antisense oligonucleotide
  misc_feature (17)..(18): BNA scaffold modification
uaaugaguucuuccaact

SEQ ID NO: 722 - RNA, 25 nt, Artificial Sequence
  Antisense oligonucleotide
ucuugauugcuggucuuguuuuuca

SEQ ID NO: 723 - RNA, 25 nt, Artificial Sequence
  Antisense oligonucleotide
  misc_feature (1)..(1): BNA scaffold modification
tcuugauugcuggucuuguuuuuca

SEQ ID NO: 724 - RNA, 25 nt, Artificial Sequence
  Antisense oligonucleotide
  misc_feature (25)..(25): BNA scaffold modification
ucuugauugcuggucuuguuuuuca

SEQ ID NO: 725 - RNA, 25 nt, Artificial Sequence
  Antisense oligonucleotide
  misc_feature (1)..(1): BNA scaffold modification
  misc_feature (25)..(25): BNA scaffold modification
tcuugauugcuggucuuguuuuuca

SEQ ID NO: 726 - RNA, 25 nt, Artificial Sequence
  Antisense oligonucleotide
  misc_feature (1)..(2): BNA scaffold modification
tcuugauugcuggucuuguuuuuca

SEQ ID NO: 727 - RNA, 25 nt, Artificial Sequence
  Antisense oligonucleotide
  misc_feature (24)..(25): BNA scaffold modification
ucuugauugcuggucuuguuuuuca

SEQ ID NO: 728 - RNA, 22 nt, Artificial Sequence
  Antisense oligonucleotide
ucuugauugcuggucuuguuuu

SEQ ID NO: 729 - RNA, 22 nt, Artificial Sequence
  Antisense oligonucleotide
  misc_feature (1)..(1): BNA scaffold modification
tcuugauugcuggucuuguuuu

SEQ ID NO: 730 - RNA, 22 nt, Artificial Sequence
  Antisense oligonucleotide
  misc_feature (22)..(22): BNA scaffold modification
ucuugauugcuggucuuguuut

SEQ ID NO: 731 - RNA, 22 nt, Artificial Sequence
  Antisense oligonucleotide
  misc_feature (1)..(1): BNA scaffold modification
  misc_feature (22)..(22): BNA scaffold modification
tcuugauugcuggucuuguuut

SEQ ID NO: 732 - RNA, 22 nt, Artificial Sequence
  Antisense oligonucleotide
  misc_feature (1)..(2): BNA scaffold modification
tcuugauugcuggucuuguuuu

SEQ ID NO: 733 - RNA, 22 nt, Artificial Sequence
  Antisense oligonucleotide
  misc_feature (21)..(22): BNA scaffold modification
ucuugauugcuggucuuguutt

SEQ ID NO: 734 - RNA, 20 nt, Artificial Sequence
  Antisense oligonucleotide
ucuugauugcuggucuuguu

SEQ ID NO: 735 - RNA, 20 nt, Artificial Sequence
  Antisense oligonucleotide
  misc_feature (1)..(1): BNA scaffold modification
tcuugauugcuggucuuguu

SEQ ID NO: 736 - RNA, 20 nt, Artificial Sequence
  Antisense oligonucleotide
  misc_feature (20)..(20): BNA scaffold modification
ucuugauugcuggucuugut

SEQ ID NO: 737 - RNA, 20 nt, Artificial Sequence
  Antisense oligonucleotide
  misc_feature (1)..(1): BNA scaffold modification
  misc_feature (20)..(20): BNA scaffold modification
tcuugauugcuggucuugut

SEQ ID NO: 738 - RNA, 20 nt, Artificial Sequence
  Antisense oligonucleotide
  misc_feature (1)..(2): BNA scaffold modification
tcuugauugcuggucuuguu

SEQ ID NO: 739 - RNA, 20 nt, Artificial Sequence
  Antisense oligonucleotide
  misc_feature (19)..(20): BNA scaffold modification
ucuugauugcuggucuugtt

SEQ ID NO: 740 - RNA, 18 nt, Artificial Sequence
  Antisense oligonucleotide
ucuugauugcuggucuug

SEQ ID NO: 741 - RNA, 18 nt, Artificial Sequence
  Antisense oligonucleotide
  misc_feature (1)..(1): BNA scaffold modification
tcuugauugcuggucuug

SEQ ID NO: 742 - RNA, 18 nt, Artificial Sequence
  Antisense oligonucleotide
  misc_feature (18)..(18): BNA scaffold modification
ucuugauugcuggucuug

SEQ ID NO: 743 - RNA, 18 nt, Artificial Sequence
  Antisense oligonucleotide
  misc_feature (1)..(1): BNA scaffold modification
  misc_feature (18)..(18): BNA scaffold modification
tcuugauugcuggucuug

SEQ ID NO: 744 - RNA, 18 nt, Artificial Sequence
  Antisense oligonucleotide
  misc_feature (1)..(2): BNA scaffold modification
tcuugauugcuggucuug

SEQ ID NO: 745 - RNA, 18 nt, Artificial Sequence
  Antisense oligonucleotide
  misc_feature (17)..(18): BNA scaffold modification
ucuugauugcuggucutg

SEQ ID NO: 746 - RNA, 16 nt, Artificial Sequence
  Antisense oligonucleotide
ucuugauugcuggucu

SEQ ID NO: 747 - RNA, 16 nt, Artificial Sequence
  Antisense oligonucleotide
  misc_feature (1)..(1): BNA scaffold modification
tcuugauugcuggucu

SEQ ID NO: 748 - RNA, 16 nt, Artificial Sequence
  Antisense oligonucleotide
  misc_feature (16)..(16): BNA scaffold modification
ucuugauugcugguct

SEQ ID NO: 749 - RNA, 16 nt, Artificial Sequence
  Antisense oligonucleotide
  misc_feature (1)..(1): BNA scaffold modification
  misc_feature (16)..(16): BNA scaffold modification
tcuugauugcugguct

SEQ ID NO: 750 - RNA, 16 nt, Artificial Sequence
  Antisense oligonucleotide
  misc_feature (1)..(2): BNA scaffold modification
tcuugauugcuggucu

SEQ ID NO: 751 - RNA, 16 nt, Artificial Sequence
  Antisense oligonucleotide
  misc_feature (15)..(16): BNA scaffold modification
ucuugauugcugguct

SEQ ID NO: 752 - RNA, 22 nt, Artificial Sequence
  Antisense oligonucleotide
ugauugcuggucuuguuuuuca

SEQ ID NO: 753 - RNA, 22 nt, Artificial Sequence
  Antisense oligonucleotide
  misc_feature (1)..(1): BNA scaffold modification
tgauugcuggucuuguuuuuca

SEQ ID NO: 754 - RNA, 22 nt, Artificial Sequence
  Antisense oligonucleotide
  misc_feature (22)..(22): BNA scaffold modification
ugauugcuggucuuguuuuuca

SEQ ID NO: 755 - RNA, 22 nt, Artificial Sequence
  Antisense oligonucleotide
  misc_feature (1)..(1): BNA scaffold modification
  misc_feature (22)..(22): BNA scaffold modification
tgauugcuggucuuguuuuuca

SEQ ID NO: 756 - RNA, 22 nt, Artificial Sequence
  Antisense oligonucleotide
  misc_feature (1)..(2): BNA scaffold modification
tgauugcuggucuuguuuuuca

SEQ ID NO: 757 - RNA, 22 nt, Artificial Sequence
  Antisense oligonucleotide
  misc_feature (21)..(22): BNA scaffold modification
ugauugcuggucuuguuuuuca

SEQ ID NO: 758 - RNA, 20 nt, Artificial Sequence
  Antisense oligonucleotide
auugcuggucuuguuuuuca

SEQ ID NO: 759 - RNA, 20 nt, Artificial Sequence
  Antisense oligonucleotide
  misc_feature (1)..(1): BNA scaffold modification
auugcuggucuuguuuuuca

SEQ ID NO: 760 - RNA, 20 nt, Artificial Sequence
  Antisense oligonucleotide
  misc_feature (20)..(20): BNA scaffold modification
auugcuggucuuguuuuuca

SEQ ID NO: 761 - RNA, 20 nt, Artificial Sequence
  Antisense oligonucleotide
  misc_feature (1)..(1): BNA scaffold modification
  misc_feature (20)..(20): BNA scaffold modification
auugcuggucuuguuuuuca

SEQ ID NO: 762 - RNA, 20 nt, Artificial Sequence
  Antisense oligonucleotide
  misc_feature (1)..(2): BNA scaffold modification
atugcuggucuuguuuuuca

SEQ ID NO: 763 - RNA, 20 nt, Artificial Sequence
  Antisense oligonucleotide
  misc_feature (19)..(20): BNA scaffold modification
auugcuggucuuguuuuuca

SEQ ID NO: 764 - RNA, 18 nt, Artificial Sequence
  Antisense oligonucleotide
ugcuggucuuguuuuuca

SEQ ID NO: 765 - RNA, 18 nt, Artificial Sequence
  Antisense oligonucleotide
  misc_feature (1)..(1): BNA scaffold modification
tgcuggucuuguuuuuca

SEQ ID NO: 766 - RNA, 18 nt, Artificial Sequence
  Antisense oligonucleotide
  misc_feature (18)..(18): BNA scaffold modification
ugcuggucuuguuuuuca

SEQ ID NO: 767 - RNA, 18 nt, Artificial Sequence
  Antisense oligonucleotide
  misc_feature (1)..(1): BNA scaffold modification
  misc_feature (18)..(18): BNA scaffold modification
tgcuggucuuguuuuuca

SEQ ID NO: 768 - RNA, 18 nt, Artificial Sequence
  Antisense oligonucleotide
  misc_feature (1)..(2): BNA scaffold modification
tgcuggucuuguuuuuca

SEQ ID NO: 769 - RNA, 18 nt, Artificial Sequence
  Antisense oligonucleotide
  misc_feature (17)..(18): BNA scaffold modification
ugcuggucuuguuuuuca

SEQ ID NO: 770 - RNA, 16 nt, Artificial Sequence
  Antisense oligonucleotide
cuggucuuguuuuuca

SEQ ID NO: 771 - RNA, 16 nt, Artificial Sequence
  Antisense oligonucleotide
  misc_feature (1)..(1): BNA scaffold modification
cuggucuuguuuuuca

SEQ ID NO: 772 - RNA, 16 nt, Artificial Sequence
  Antisense oligonucleotide
  misc_feature (16)..(16): BNA scaffold modification
cuggucuuguuuuuca

SEQ ID NO: 773 - RNA, 16 nt, Artificial Sequence
  Antisense oligonucleotide
  misc_feature (1)..(1): BNA scaffold modification
  misc_feature (16)..(16): BNA scaffold modification
cuggucuuguuuuuca

SEQ ID NO: 774 - RNA, 16 nt, Artificial Sequence
  Antisense oligonucleotide
  misc_feature (1)..(2): BNA scaffold modification
ctggucuuguuuuuca

SEQ ID NO: 775 - RNA, 16 nt, Artificial Sequence
  Antisense oligonucleotide
  misc_feature (15)..(16): BNA scaffold modification
cuggucuuguuuuuca

SEQ ID NO: 776 - RNA, 18 nt, Artificial Sequence
  Antisense oligonucleotide
ugauugcuggucuuguuu

SEQ ID NO: 777 - RNA, 18 nt, Artificial Sequence
  Antisense oligonucleotide
  misc_feature (1)..(1): BNA scaffold modification
tgauugcuggucuuguuu

SEQ ID NO: 778 - RNA, 18 nt, Artificial Sequence
  Antisense oligonucleotide
  misc_feature (18)..(18): BNA scaffold modification
ugauugcuggucuuguut

SEQ ID NO: 779 - RNA, 18 nt, Artificial Sequence
  Antisense oligonucleotide
  misc_feature (1)..(1): BNA scaffold modification
  misc_feature (18)..(18): BNA scaffold modification
tgauugcuggucuuguut

SEQ ID NO: 780 - RNA, 18 nt, Artificial Sequence
  Antisense oligonucleotide
  misc_feature (1)..(2): BNA scaffold modification
tgauugcuggucuuguuu

SEQ ID NO: 781 - RNA, 18 nt, Artificial Sequence
  Antisense oligonucleotide
  misc_feature (17)..(18): BNA scaffold modification
ugauugcuggucuugutt

SEQ ID NO: 782 - RNA, 25 nt, Artificial Sequence
  Antisense oligonucleotide
uguucuagccucuugauugcugguc

SEQ ID NO: 783 - RNA, 25 nt, Artificial Sequence
  Antisense oligonucleotide
  misc_feature (1)..(1): BNA scaffold modification
tguucuagccucuugauugcugguc

SEQ ID NO: 784 - RNA, 25 nt, Artificial Sequence
  Antisense oligonucleotide
  misc_feature (25)..(25): BNA scaffold modification
uguucuagccucuugauugcugguc

SEQ ID NO: 785 - RNA, 25 nt, Artificial Sequence
  Antisense oligonucleotide
  misc_feature (1)..(1): BNA scaffold modification
  misc_feature (25)..(25): BNA scaffold modification
tguucuagccucuugauugcugguc

SEQ ID NO: 786 - RNA, 25 nt, Artificial Sequence
  Antisense oligonucleotide
  misc_feature (1)..(2): BNA scaffold modification
tguucuagccucuugauugcugguc

SEQ ID NO: 787 - RNA, 25 nt, Artificial Sequence
  Antisense oligonucleotide
  misc_feature (24)..(25): BNA scaffold modification
uguucuagccucuugauugcuggtc

SEQ ID NO: 788 - RNA, 22 nt, Artificial Sequence
  Antisense oligonucleotide
uguucuagccucuugauugcug

SEQ ID NO: 789 - RNA, 22 nt, Artificial Sequence
  Antisense oligonucleotide
  misc_feature (1)..(1): BNA scaffold modification
tguucuagccucuugauugcug

SEQ ID NO: 790 - RNA, 22 nt, Artificial Sequence
  Antisense oligonucleotide
  misc_feature (22)..(22): BNA scaffold modification
uguucuagccucuugauugcug

SEQ ID NO: 791 - RNA, 22 nt, Artificial Sequence
  Antisense oligonucleotide
  misc_feature (1)..(1): BNA scaffold modification
  misc_feature (22)..(22): BNA scaffold modification
tguucuagccucuugauugcug

SEQ ID NO: 792 - RNA, 22 nt, Artificial Sequence
  Antisense oligonucleotide
  misc_feature (1)..(2): BNA scaffold modification
tguucuagccucuugauugcug

SEQ ID NO: 793 - RNA, 22 nt, Artificial Sequence
  Antisense oligonucleotide
  misc_feature (21)..(22): BNA scaffold modification
uguucuagccucuugauugctg

SEQ ID NO: 794 - RNA, 20 nt, Artificial Sequence
  Antisense oligonucleotide
uguucuagccucuugauugc

SEQ ID NO: 795 - RNA, 20 nt, Artificial Sequence
  Antisense oligonucleotide
  misc_feature (1)..(1): BNA scaffold modification
tguucuagccucuugauugc

SEQ ID NO: 796 - RNA, 20 nt, Artificial Sequence
  Antisense oligonucleotide
  misc_feature (20)..(20): BNA scaffold modification
uguucuagccucuugauugc

SEQ ID NO: 797 - RNA, 20 nt, Artificial Sequence
  Antisense oligonucleotide
  misc_feature (1)..(1): BNA scaffold modification
  misc_feature (20)..(20): BNA scaffold modification
tguucuagccucuugauugc

SEQ ID NO: 798 - RNA, 20 nt, Artificial Sequence
  Antisense oligonucleotide
  misc_feature (1)..(2): BNA scaffold modification
tguucuagccucuugauugc

SEQ ID NO: 799 - RNA, 20 nt, Artificial Sequence
  Antisense oligonucleotide
  misc_feature (19)..(20): BNA scaffold modification
uguucuagccucuugauugc

SEQ ID NO: 800 - RNA, 18 nt, Artificial Sequence
  Antisense oligonucleotide
uguucuagccucuugauu

SEQ ID NO: 801 - RNA, 18 nt, Artificial Sequence
  Antisense oligonucleotide
  misc_feature (1)..(1): BNA scaffold modification
tguucuagccucuugauu

SEQ ID NO: 802 - RNA, 18 nt, Artificial Sequence
  Antisense oligonucleotide
  misc_feature (18)..(18): BNA scaffold modification
uguucuagccucuugaut

SEQ ID NO: 803 - RNA, 18 nt, Artificial Sequence
  Antisense oligonucleotide
  misc_feature (1)..(1): BNA scaffold modification
  misc_feature (18)..(18): BNA scaffold modification
tguucuagccucuugaut

SEQ ID NO: 804 - RNA, 18 nt, Artificial Sequence
  Antisense oligonucleotide
  misc_feature (1)..(2): BNA scaffold modification
tguucuagccucuugauu

SEQ ID NO: 805 - RNA, 18 nt, Artificial Sequence
  Antisense oligonucleotide
  misc_feature (17)..(18): BNA scaffold modification
uguucuagccucuugatt

SEQ ID NO: 806 - RNA, 16 nt, Artificial Sequence
  Antisense oligonucleotide
uguucuagccucuuga

SEQ ID NO: 807 - RNA, 16 nt, Artificial Sequence
  Antisense oligonucleotide
  misc_feature (1)..(1): BNA scaffold modification
tguucuagccucuuga

SEQ ID NO: 808 - RNA, 16 nt, Artificial Sequence
  Antisense oligonucleotide
  misc_feature (16)..(16): BNA scaffold modification
uguucuagccucuuga

SEQ ID NO: 809 - RNA, 16 nt, Artificial Sequence
  Antisense oligonucleotide
  misc_feature (1)..(1): BNA scaffold modification
  misc_feature (16)..(16): BNA scaffold modification
tguucuagccucuuga

SEQ ID NO: 810 - RNA, 16 nt, Artificial Sequence
  Antisense oligonucleotide
  misc_feature (1)..(2): BNA scaffold modification
tguucuagccucuuga

SEQ ID NO: 811 - RNA, 16 nt, Artificial Sequence
  Antisense oligonucleotide
  misc_feature (15)..(16): BNA scaffold modification
uguucuagccucuuga

SEQ ID NO: 812 - RNA, 22 nt, Artificial Sequence
  Antisense oligonucleotide
ucuagccucuugauugcugguc

SEQ ID NO: 813 - RNA, 22 nt, Artificial Sequence
  Antisense oligonucleotide
  misc_feature (1)..(1): BNA scaffold modification
tcuagccucuugauugcugguc

SEQ ID NO: 814 - RNA, 22 nt, Artificial Sequence
  Antisense oligonucleotide
  misc_feature (22)..(22): BNA scaffold modification
ucuagccucuugauugcugguc

SEQ ID NO: 815 - RNA, 22 nt, Artificial Sequence
  Antisense oligonucleotide
  misc_feature (1)..(1): BNA scaffold modification
  misc_feature (22)..(22): BNA scaffold modification
tcuagccucuugauugcugguc

SEQ ID NO: 816 - RNA, 22 nt, Artificial Sequence
  Antisense oligonucleotide
  misc_feature (1)..(2): BNA scaffold modification
tcuagccucuugauugcugguc

SEQ ID NO: 817 - RNA, 22 nt, Artificial Sequence
  Antisense oligonucleotide
  misc_feature (21)..(22): BNA scaffold modification
ucuagccucuugauugcuggtc

SEQ ID NO: 818 - RNA, 20 nt, Artificial Sequence
  Antisense oligonucleotide
uagccucuugauugcugguc

SEQ ID NO: 819 - RNA, 20 nt, Artificial Sequence
  Antisense oligonucleotide
  misc_feature (1)..(1): BNA scaffold modification
tagccucuugauugcugguc

SEQ ID NO: 820 - RNA, 20 nt, Artificial Sequence
  Antisense oligonucleotide
  misc_feature (20)..(20): BNA scaffold modification
uagccucuugauugcugguc

SEQ ID NO: 821 - RNA, 20 nt, Artificial Sequence
  Antisense oligonucleotide
  misc_feature (1)..(1): BNA scaffold modification
  misc_feature (20)..(20): BNA scaffold modification
tagccucuugauugcugguc

SEQ ID NO: 822 - RNA, 20 nt, Artificial Sequence
  Antisense oligonucleotide
  misc_feature (1)..(2): BNA scaffold modification
tagccucuugauugcugguc

SEQ ID NO: 823 - RNA, 20 nt, Artificial Sequence
  Antisense oligonucleotide
  misc_feature (19)..(20): BNA scaffold modification
uagccucuugauugcuggtc

SEQ ID NO: 824 - RNA, 18 nt, Artificial Sequence
  Antisense oligonucleotide
gccucuugauugcugguc

SEQ ID NO: 825 - RNA, 18 nt, Artificial Sequence
  Antisense oligonucleotide
  misc_feature (1)..(1): BNA scaffold modification
gccucuugauugcugguc

SEQ ID NO: 826 - RNA, 18 nt, Artificial Sequence
  Antisense oligonucleotide
  misc_feature (18)..(18): BNA scaffold modification
gccucuugauugcugguc

SEQ ID NO: 827 - RNA, 18 nt, Artificial Sequence
  Antisense oligonucleotide
  misc_feature (1)..(1): BNA scaffold modification
  misc_feature (18)..(18): BNA scaffold modification
gccucuugauugcugguc

SEQ ID NO: 828 - RNA, 18 nt, Artificial Sequence
  Antisense oligonucleotide
  misc_feature (1)..(2): BNA scaffold modification
gccucuugauugcugguc

SEQ ID NO: 829 - RNA, 18 nt, Artificial Sequence
  Antisense oligonucleotide
  misc_feature (17)..(18): BNA scaffold modification
gccucuugauugcuggtc

SEQ ID NO: 830 - RNA, 16 nt, Artificial Sequence
  Antisense oligonucleotide
cucuugauugcugguc

SEQ ID NO: 831 - RNA, 16 nt, Artificial Sequence
  Antisense oligonucleotide
  misc_feature (1)..(1): BNA scaffold modification
cucuugauugcugguc

SEQ ID NO: 832 - RNA, 16 nt, Artificial Sequence
  Antisense oligonucleotide
  misc_feature (16)..(16): BNA scaffold modification
cucuugauugcugguc

SEQ ID NO: 833 - RNA, 16 nt, Artificial Sequence
  Antisense oligonucleotide
  misc_feature (1)..(1): BNA scaffold modification
  misc_feature (16)..(16): BNA scaffold modification
cucuugauugcugguc

SEQ ID NO: 834 - RNA, 16 nt, Artificial Sequence
  Antisense oligonucleotide
  misc_feature (1)..(2): BNA scaffold modification
ctcuugauugcugguc

SEQ ID NO: 835 - RNA, 16 nt, Artificial Sequence
  Antisense oligonucleotide
  misc_feature (15)..(16): BNA scaffold modification
cucuugauugcuggtc

SEQ ID NO: 836 - RNA, 18 nt, Artificial Sequence
  Antisense oligonucleotide
cuagccucuugauugcug

SEQ ID NO: 837 - RNA, 18 nt, Artificial Sequence
  Antisense oligonucleotide
  misc_feature (1)..(1): BNA scaffold modification
cuagccucuugauugcug

SEQ ID NO: 838 - RNA, 18 nt, Artificial Sequence
  Antisense oligonucleotide
  misc_feature (18)..(18): BNA scaffold modification
cuagccucuugauugcug

SEQ ID NO: 839 - RNA, 18 nt, Artificial Sequence
  Antisense oligonucleotide
  misc_feature (1)..(1): BNA scaffold modification
  misc_feature (18)..(18): BNA scaffold modification
cuagccucuugauugcug

SEQ ID NO: 840 - RNA, 18 nt, Artificial Sequence
  Antisense oligonucleotide
  misc_feature (1)..(2): BNA scaffold modification
ctagccucuugauugcug

SEQ ID NO: 841 - RNA, 18 nt, Artificial Sequence
  Antisense oligonucleotide
  misc_feature (17)..(18): BNA scaffold modification
cuagccucuugauugctg

SEQ ID NO: 842 - RNA, 18 nt, Artificial Sequence
  Antisense oligonucleotide
cuguugccuccgguucug

SEQ ID NO: 843 - RNA, 18 nt, Artificial Sequence
  Antisense oligonucleotide
  misc_feature (1)..(1): BNA scaffold modification
cuguugccuccgguucug

SEQ ID NO: 844 - RNA, 18 nt, Artificial Sequence
  Antisense oligonucleotide
  misc_feature (18)..(18): BNA scaffold modification
cuguugccuccgguucug

SEQ ID NO: 845 - RNA, 18 nt, Artificial Sequence
  Antisense oligonucleotide
  misc_feature (1)..(1): BNA scaffold modification
  misc_feature (18)..(18): BNA scaffold modification
cuguugccuccgguucug

SEQ ID NO: 846 - RNA, 18 nt, Artificial Sequence
  Antisense oligonucleotide
  misc_feature (1)..(2): BNA scaffold modification
ctguugccuccgguucug

SEQ ID NO: 847 - RNA, 18 nt, Artificial Sequence
  Antisense oligonucleotide
  misc_feature (17)..(18): BNA scaffold modification
cuguugccuccgguuctg

SEQ ID NO: 848 - RNA, 20 nt, Artificial Sequence
  Antisense oligonucleotide
cuguugccuccgguucugaa

SEQ ID NO: 849 - RNA, 20 nt, Artificial Sequence
  Antisense oligonucleotide
  misc_feature (1)..(1): BNA scaffold modification
cuguugccuccgguucugaa

SEQ ID NO: 850 - RNA, 20 nt, Artificial Sequence
  Antisense oligonucleotide
  misc_feature (20)..(20): BNA scaffold modification
cuguugccuccgguucugaa

SEQ ID NO: 851 - RNA, 20 nt, Artificial Sequence
  Antisense oligonucleotide
  misc_feature (1)..(1): BNA scaffold modification
  misc_feature (20)..(20): BNA scaffold modification
cuguugccuccgguucugaa

SEQ ID NO: 852 - RNA, 20 nt, Artificial Sequence
  Antisense oligonucleotide
  misc_feature (1)..(2): BNA scaffold modification
ctguugccuccgguucugaa

SEQ ID NO: 853 - RNA, 20 nt, Artificial Sequence
  Antisense oligonucleotide
  misc_feature (19)..(20): BNA scaffold modification
cuguugccuccgguucugaa

SEQ ID NO: 854 - RNA, 20 nt, Artificial Sequence
  Antisense oligonucleotide
cuccgguucugaagguguuc

SEQ ID NO: 855 - RNA, 20 nt, Artificial Sequence
  Antisense oligonucleotide
  misc_feature (1)..(1): BNA scaffold modification
cuccgguucugaagguguuc

SEQ ID NO: 856 - RNA, 20 nt, Artificial Sequence
  Antisense oligonucleotide
  misc_feature (20)..(20): BNA scaffold modification
cuccgguucugaagguguuc

SEQ ID NO: 857 - RNA, 20 nt, Artificial Sequence
  Antisense oligonucleotide
  misc_feature (1)..(1): BNA scaffold modification
  misc_feature (20)..(20): BNA scaffold modification
cuccgguucugaagguguuc

SEQ ID NO: 858 - RNA, 20 nt, Artificial Sequence
  Antisense oligonucleotide
  misc_feature (1)..(2): BNA scaffold modification
ctccgguucugaagguguuc

SEQ ID NO: 859 - RNA, 20 nt, Artificial Sequence
  Antisense oligonucleotide
  misc_feature (19)..(20): BNA scaffold modification
cuccgguucugaaggugutc

SEQ ID NO: 860 - RNA, 25 nt, Artificial Sequence
  Antisense oligonucleotide
guugccuccgguucugaagguguuc

SEQ ID NO: 861 - RNA, 25 nt, Artificial Sequence
  Antisense oligonucleotide
  misc_feature (1)..(1): BNA scaffold modification
guugccuccgguucugaagguguuc

SEQ ID NO: 862 - RNA, 25 nt, Artificial Sequence
  Antisense oligonucleotide
  misc_feature (25)..(25): BNA scaffold modification
guugccuccgguucugaagguguuc

SEQ ID NO: 863 - RNA, 25 nt, Artificial Sequence
  Antisense oligonucleotide
  misc_feature (1)..(1): BNA scaffold modification
  misc_feature (25)..(25): BNA scaffold modification
guugccuccgguucugaagguguuc

SEQ ID NO: 864 - RNA, 25 nt, Artificial Sequence
  Antisense oligonucleotide
  misc_feature (1)..(2): BNA scaffold modification
gtugccuccgguucugaagguguuc

SEQ ID NO: 865 - RNA, 25 nt, Artificial Sequence
  Antisense oligonucleotide
  misc_feature (24)..(25): BNA scaffold modification
guugccuccgguucugaaggugutc

SEQ ID NO: 866 - RNA, 24 nt, Artificial Sequence
  Antisense oligonucleotide
guucugaagguguucuuguacuuc

SEQ ID NO: 867 - RNA, 24 nt, Artificial Sequence
  Antisense oligonucleotide
  misc_feature (1)..(1): BNA scaffold modification
guucugaagguguucuuguacuuc

SEQ ID NO: 868 - RNA, 24 nt, Artificial Sequence
  Antisense oligonucleotide
  misc_feature (24)..(24): BNA scaffold modification
guucugaagguguucuuguacuuc

SEQ ID NO: 869 - RNA, 24 nt, Artificial Sequence
  Antisense oligonucleotide
  misc_feature (1)..(1): BNA scaffold modification
  misc_feature (24)..(24): BNA scaffold modification
guucugaagguguucuuguacuuc

SEQ ID NO: 870 - RNA, 24 nt, Artificial Sequence
  Antisense oligonucleotide
  misc_feature (1)..(2): BNA scaffold modification
gtucugaagguguucuuguacuuc

SEQ ID NO: 871 - RNA, 24 nt, Artificial Sequence
  Antisense oligonucleotide
  misc_feature (23)..(24): BNA scaffold modification
guucugaagguguucuuguacutc

SEQ ID NO: 872 - RNA, 22 nt, Artificial Sequence
  Antisense oligonucleotide
guucugaagguguucuuguacu

SEQ ID NO: 873 - RNA, 22 nt, Artificial Sequence
  Antisense oligonucleotide
  misc_feature (1)..(1): BNA scaffold modification
guucugaagguguucuuguacu

SEQ ID NO: 874 - RNA, 22 nt, Artificial Sequence
  Antisense oligonucleotide
  misc_feature (22)..(22): BNA scaffold modification
guucugaagguguucuuguact

SEQ ID NO: 875 - RNA, 22 nt, Artificial Sequence
  Antisense oligonucleotide
  misc_feature (1)..(1): BNA scaffold modification
  misc_feature (22)..(22): BNA scaffold modification
guucugaagguguucuuguact

SEQ ID NO: 876 - RNA, 22 nt, Artificial Sequence
  Antisense oligonucleotide
  misc_feature (1)..(2): BNA scaffold modification
gtucugaagguguucuuguacu

SEQ ID NO: 877 - RNA, 22 nt, Artificial Sequence
  Antisense oligonucleotide
  misc_feature (21)..(22): BNA scaffold modification
guucugaagguguucuuguact

SEQ ID NO: 878 - RNA, 20 nt, Artificial Sequence
  Antisense oligonucleotide
guucugaagguguucuugua

SEQ ID NO: 879 - RNA, 20 nt, Artificial Sequence
  Antisense oligonucleotide
  misc_feature (1)..(1): BNA scaffold modification
guucugaagguguucuugua

SEQ ID NO: 880 - RNA, 20 nt, Artificial Sequence
  Antisense oligonucleotide
  misc_feature (20)..(20): BNA scaffold modification
guucugaagguguucuugua

SEQ ID NO: 881 - RNA, 20 nt, Artificial Sequence
  Antisense oligonucleotide
  misc_feature (1)..(1): BNA scaffold modification
  misc_feature (20)..(20): BNA scaffold modification
guucugaagguguucuugua

SEQ ID NO: 882 - RNA, 20 nt, Artificial Sequence
  Antisense oligonucleotide
  misc_feature (1)..(2): BNA scaffold modification
gtucugaagguguucuugua

SEQ ID NO: 883 - RNA, 20 nt, Artificial Sequence
  Antisense oligonucleotide
  misc_feature (19)..(20): BNA scaffold modification
guucugaagguguucuugta

SEQ ID NO: 884 - RNA, 18 nt, Artificial Sequence
  Antisense oligonucleotide
guucugaagguguucuug

SEQ ID NO: 885 - RNA, 18 nt, Artificial Sequence
  Antisense oligonucleotide
  misc_feature (1)..(1): BNA scaffold modification
guucugaagguguucuug

SEQ ID NO: 886 - RNA, 18 nt, Artificial Sequence
  Antisense oligonucleotide
  misc_feature (18)..(18): BNA scaffold modification
guucugaagguguucuug

SEQ ID NO: 887 - RNA, 18 nt, Artificial Sequence
  Antisense oligonucleotide
  misc_feature (1)..(1): BNA scaffold modification
  misc_feature (18)..(18): BNA scaffold modification
guucugaagguguucuug

SEQ ID NO: 888 - RNA, 18 nt, Artificial Sequence
  Antisense oligonucleotide
  misc_feature (1)..(2): BNA scaffold modification
gtucugaagguguucuug

SEQ ID NO: 889 - RNA, 18 nt, Artificial Sequence
  Antisense oligonucleotide
  misc_feature (17)..(18): BNA scaffold modification
guucugaagguguucutg

SEQ ID NO: 890 - RNA, 16 nt, Artificial Sequence
  Antisense oligonucleotide
guucugaagguguucu

SEQ ID NO: 891 - RNA, 16 nt, Artificial Sequence
  Antisense oligonucleotide
  misc_feature (1)..(1): BNA scaffold modification
guucugaagguguucu

SEQ ID NO: 892 - RNA, 16 nt, Artificial Sequence
  Antisense oligonucleotide
  misc_feature (16)..(16): BNA scaffold modification
guucugaagguguuct

SEQ ID NO: 893 - RNA, 16 nt, Artificial Sequence
  Antisense oligonucleotide
  misc_feature (1)..(1): BNA scaffold modification
  misc_feature (16)..(16): BNA scaffold modification
guucugaagguguuct

SEQ ID NO: 894 - RNA, 16 nt, Artificial Sequence
  Antisense oligonucleotide
  misc_feature (1)..(2): BNA scaffold modification
gtucugaagguguucu

SEQ ID NO: 895 - RNA, 16 nt, Artificial Sequence
  Antisense oligonucleotide
  misc_feature (15)..(16): BNA scaffold modification
guucugaagguguuct

SEQ ID NO: 896 - RNA, 22 nt, Artificial Sequence
  Antisense oligonucleotide
ucugaagguguucuuguacuuc

SEQ ID NO: 897 - RNA, 22 nt, Artificial Sequence
  Antisense oligonucleotide
  misc_feature (1)..(1): BNA scaffold modification
tcugaagguguucuuguacuuc

SEQ ID NO: 898 - RNA, 22 nt, Artificial Sequence
  Antisense oligonucleotide
  misc_feature (22)..(22): BNA scaffold modification
ucugaagguguucuuguacuuc

SEQ ID NO: 899 - RNA, 22 nt, Artificial Sequence
  Antisense oligonucleotide
  misc_feature (1)..(1): BNA scaffold modification
  misc_feature (22)..(22): BNA scaffold modification
tcugaagguguucuuguacuuc

SEQ ID NO: 900 - RNA, 22 nt, Artificial Sequence
  Antisense oligonucleotide
  misc_feature (1)..(2): BNA scaffold modification
tcugaagguguucuuguacuuc

SEQ ID NO: 901 - RNA, 22 nt, Artificial Sequence
  Antisense oligonucleotide
  misc_feature (21)..(22): BNA scaffold modification
ucugaagguguucuuguacutc

SEQ ID NO: 902 - RNA, 20 nt, Artificial Sequence
  Antisense oligonucleotide
ugaagguguucuuguacuuc

SEQ ID NO: 903 - RNA, 20 nt, Artificial Sequence
  Antisense oligonucleotide
  misc_feature (1)..(1): BNA scaffold modification
tgaagguguucuuguacuuc

SEQ ID NO: 904 - RNA, 20 nt, Artificial Sequence
  Antisense oligonucleotide
  misc_feature (20)..(20): BNA scaffold modification
ugaagguguucuuguacuuc

SEQ ID NO: 905 - RNA, 20 nt, Artificial Sequence
  Antisense oligonucleotide
  misc_feature (1)..(1): BNA scaffold modification
  misc_feature (20)..(20): BNA scaffold modification
tgaagguguucuuguacuuc

SEQ ID NO: 906 - RNA, 20 nt, Artificial Sequence
  Antisense oligonucleotide
  misc_feature (1)..(2): BNA scaffold modification
tgaagguguucuuguacuuc

SEQ ID NO: 907 - RNA, 20 nt, Artificial Sequence
  Antisense oligonucleotide
  misc_feature (19)..(20): BNA scaffold modification
ugaagguguucuuguacutc

SEQ ID NO: 908 - RNA, 18 nt, Artificial Sequence
  Antisense oligonucleotide
aagguguucuuguacuuc

SEQ ID NO: 909 - RNA, 18 nt, Artificial Sequence
  Antisense oligonucleotide
  misc_feature (1)..(1): BNA scaffold modification
aagguguucuuguacuuc

SEQ ID NO: 910 - RNA, 18 nt, Artificial Sequence
  Antisense oligonucleotide
  misc_feature (18)..(18): BNA scaffold modification
aagguguucuuguacuuc

SEQ ID NO: 911 - RNA, 18 nt, Artificial Sequence
  Antisense oligonucleotide
  misc_feature (1)..(1): BNA scaffold modification
  misc_feature (18)..(18): BNA scaffold modification
aagguguucuuguacuuc

SEQ ID NO: 912 - RNA, 18 nt, Artificial Sequence
  Antisense oligonucleotide
  misc_feature (1)..(2): BNA scaffold modification
aagguguucuuguacuuc

SEQ ID NO: 913 - RNA, 18 nt, Artificial Sequence
  Antisense oligonucleotide
  misc_feature (17)..(18): BNA scaffold modification
aagguguucuuguacutc

SEQ ID NO: 914 - RNA, 16 nt, Artificial Sequence
  Antisense oligonucleotide
gguguucuuguacuuc

SEQ ID NO: 915 - RNA, 16 nt, Artificial Sequence
  Antisense oligonucleotide
  misc_feature (1)..(1): BNA scaffold modification
gguguucuuguacuuc

SEQ ID NO: 916 - RNA, 16 nt, Artificial Sequence
  Antisense oligonucleotide
  misc_feature (16)..(16): BNA scaffold modification
gguguucuuguacuuc

SEQ ID NO: 917 - RNA, 16 nt, Artificial Sequence
  Antisense oligonucleotide
  misc_feature (1)..(1): BNA scaffold modification
  misc_feature (16)..(16): BNA scaffold modification
gguguucuuguacuuc

SEQ ID NO: 918 - RNA, 16 nt, Artificial Sequence
  Antisense oligonucleotide
  misc_feature (1)..(2): BNA scaffold modification
gguguucuuguacuuc

SEQ ID NO: 919 - RNA, 16 nt, Artificial Sequence
  Antisense oligonucleotide
  misc_feature (15)..(16): BNA scaffold modification
gguguucuuguacutc

SEQ ID NO: 920 - RNA, 25 nt, Artificial Sequence
  Antisense oligonucleotide
agcuuccagccauuguguugaaucc

SEQ ID NO: 921 - RNA, 25 nt, Artificial Sequence
  Antisense oligonucleotide
  misc_feature (1)..(1): BNA scaffold modification
agcuuccagccauuguguugaaucc

SEQ ID NO: 922 - RNA, 25 nt, Artificial Sequence
  Antisense oligonucleotide
  misc_feature (25)..(25): BNA scaffold modification
agcuuccagccauuguguugaaucc

SEQ ID NO: 923 - RNA, 25 nt, Artificial Sequence
  Antisense oligonucleotide
  misc_feature (1)..(1): BNA scaffold modification
  misc_feature (25)..(25): BNA scaffold modification
agcuuccagccauuguguugaaucc

SEQ ID NO: 924 - RNA, 25 nt, Artificial Sequence
  Antisense oligonucleotide
  misc_feature (1)..(2): BNA scaffold modification
agcuuccagccauuguguugaaucc

SEQ ID NO: 925 - RNA, 25 nt, Artificial Sequence
  Antisense oligonucleotide
  misc_feature (24)..(25): BNA scaffold modification
agcuuccagccauuguguugaaucc

SEQ ID NO: 926 - RNA, 22 nt, Artificial Sequence
  Antisense oligonucleotide
agcuuccagccauuguguugaa

SEQ ID NO: 927 - RNA, 22 nt, Artificial Sequence
  Antisense oligonucleotide
  misc_feature (1)..(1): BNA scaffold modification
agcuuccagccauuguguugaa

SEQ ID NO: 928 - RNA, 22 nt, Artificial Sequence
  Antisense oligonucleotide
  misc_feature (22)..(22): BNA scaffold modification
agcuuccagccauuguguugaa

SEQ ID NO: 929 - RNA, 22 nt, Artificial Sequence
  Antisense oligonucleotide
  misc_feature (1)..(1): BNA scaffold modification
  misc_feature (22)..(22): BNA scaffold modification
agcuuccagccauuguguugaa

SEQ ID NO: 930 - RNA, 22 nt, Artificial Sequence
  Antisense oligonucleotide
  misc_feature (1)..(2): BNA scaffold modification
agcuuccagccauuguguugaa

SEQ ID NO: 931 - RNA, 22 nt, Artificial Sequence
  Antisense oligonucleotide
  misc_feature (21)..(22): BNA scaffold modification
agcuuccagccauuguguugaa

SEQ ID NO: 932 - RNA, 20 nt, Artificial Sequence
  Antisense oligonucleotide
agcuuccagccauuguguug

SEQ ID NO: 933 - RNA, 20 nt, Artificial Sequence
  Antisense oligonucleotide
  misc_feature (1)..(1): BNA scaffold modification
agcuuccagccauuguguug

SEQ ID NO: 934 - RNA, 20 nt, Artificial Sequence
  Antisense oligonucleotide
  misc_feature (20)..(20): BNA scaffold modification
agcuuccagccauuguguug

SEQ ID NO: 935 - RNA, 20 nt, Artificial Sequence
  Antisense oligonucleotide
  misc_feature (1)..(1): BNA scaffold modification
  misc_feature (20)..(20): BNA scaffold modification
agcuuccagccauuguguug

SEQ ID NO: 936 - RNA, 20 nt, Artificial Sequence
  Antisense oligonucleotide
  misc_feature (1)..(2): BNA scaffold modification
agcuuccagccauuguguug

SEQ ID NO: 937 - RNA, 20 nt, Artificial Sequence
  Antisense oligonucleotide
  misc_feature (19)..(20): BNA scaffold modification
agcuuccagccauugugutg

SEQ ID NO: 938 - RNA, 18 nt, Artificial Sequence
  Antisense oligonucleotide
agcuuccagccauugugu

SEQ ID NO: 939 - RNA, 18 nt, Artificial Sequence
  Antisense oligonucleotide
  misc_feature (1)..(1): BNA scaffold modification
agcuuccagccauugugu

SEQ ID NO: 940 - RNA, 18 nt, Artificial Sequence
  Antisense oligonucleotide
  misc_feature (18)..(18): BNA scaffold modification
agcuuccagccauugugt

SEQ ID NO: 941 - RNA, 18 nt, Artificial Sequence
  Antisense oligonucleotide
  misc_feature (1)..(1): BNA scaffold modification
  misc_feature (18)..(18): BNA scaffold modification
agcuuccagccauugugt

SEQ ID NO: 942 - RNA, 18 nt, Artificial Sequence
  Antisense oligonucleotide
  misc_feature (1)..(2): BNA scaffold modification
agcuuccagccauugugu

SEQ ID NO: 943 - RNA, 18 nt, Artificial Sequence
  Antisense oligonucleotide
  misc_feature (17)..(18): BNA scaffold modification
agcuuccagccauugugt

SEQ ID NO: 944 - RNA, 16 nt, Artificial Sequence
  Antisense oligonucleotide
agcuuccagccauugu

SEQ ID NO: 945 - RNA, 16 nt, Artificial Sequence
  Antisense oligonucleotide
  misc_feature (1)..(1): BNA scaffold modification
agcuuccagccauugu

SEQ ID NO: 946 - RNA, 16 nt, Artificial Sequence
  Antisense oligonucleotide
  misc_feature (16)..(16): BNA scaffold modification
agcuuccagccauugt

SEQ ID NO: 947 - RNA, 16 nt, Artificial Sequence
  Antisense oligonucleotide
  misc_feature (1)..(1): BNA scaffold modification
  misc_feature (16)..(16): BNA scaffold modification
agcuuccagccauugt

SEQ ID NO: 948 - RNA, 16 nt, Artificial Sequence
  Antisense oligonucleotide
  misc_feature (1)..(2): BNA scaffold modification
agcuuccagccauugu

SEQ ID NO: 949 - RNA, 16 nt, Artificial Sequence
  Antisense oligonucleotide
  misc_feature (15)..(16): BNA scaffold modification
agcuuccagccauugt

SEQ ID NO: 950 - RNA, 22 nt, Artificial Sequence
  Antisense oligonucleotide
uuccagccauuguguugaaucc

SEQ ID NO: 951 - RNA, 22 nt, Artificial Sequence
  Antisense oligonucleotide
  misc_feature (1)..(1): BNA scaffold modification
tuccagccauuguguugaaucc

SEQ ID NO: 952 - RNA, 22 nt, Artificial Sequence
  Antisense oligonucleotide
  misc_feature (22)..(22): BNA scaffold modification
uuccagccauuguguugaaucc

SEQ ID NO: 953 - RNA, 22 nt, Artificial Sequence
  Antisense oligonucleotide
  misc_feature (1)..(1): BNA scaffold modification
  misc_feature (22)..(22): BNA scaffold modification
tuccagccauuguguugaaucc

SEQ ID NO: 954 - RNA, 22 nt, Artificial Sequence
  Antisense oligonucleotide
  misc_feature (1)..(2): BNA scaffold modification
ttccagccauuguguugaaucc

SEQ ID NO: 955 - RNA, 22 nt, Artificial Sequence
  Antisense oligonucleotide
  misc_feature (21)..(22): BNA scaffold modification
uuccagccauuguguugaaucc

SEQ ID NO: 956 - RNA, 20 nt, Artificial Sequence
  Antisense oligonucleotide
ccagccauuguguugaaucc

SEQ ID NO: 957 - RNA, 20 nt, Artificial Sequence
  Antisense oligonucleotide
  misc_feature (1)..(1): BNA scaffold modification
ccagccauuguguugaaucc

SEQ ID NO: 958 - RNA, 20 nt, Artificial Sequence
  Antisense oligonucleotide
  misc_feature (20)..(20): BNA scaffold modification
ccagccauuguguugaaucc

SEQ ID NO: 959 - RNA, 20 nt, Artificial Sequence
  Antisense oligonucleotide
  misc_feature (1)..(1): BNA scaffold modification
  misc_feature (20)..(20): BNA scaffold modification
ccagccauuguguugaaucc

SEQ ID NO: 960 - RNA, 20 nt, Artificial Sequence
  Antisense oligonucleotide
  misc_feature (1)..(2): BNA scaffold modification
ccagccauuguguugaaucc

SEQ ID NO: 961 - RNA, 20 nt, Artificial Sequence
  Antisense oligonucleotide
  misc_feature (19)..(20): BNA scaffold modification
ccagccauuguguugaaucc

SEQ ID NO: 962 - RNA, 18 nt, Artificial Sequence
  Antisense oligonucleotide
agccauuguguugaaucc

SEQ ID NO: 963 - RNA, 18 nt, Artificial Sequence
  Antisense oligonucleotide
  misc_feature (1)..(1): BNA scaffold modification
agccauuguguugaaucc

SEQ ID NO: 964 - RNA, 18 nt, Artificial Sequence
  Antisense oligonucleotide
  misc_feature (18)..(18): BNA scaffold modification
agccauuguguugaaucc

SEQ ID NO: 965 - RNA, 18 nt, Artificial Sequence
  Antisense oligonucleotide
  misc_feature (1)..(1): BNA scaffold modification
  misc_feature (18)..(18): BNA scaffold modification
agccauuguguugaaucc

SEQ ID NO: 966 - RNA, 18 nt, Artificial Sequence
  Antisense oligonucleotide
  misc_feature (1)..(2): BNA scaffold modification
agccauuguguugaaucc

SEQ ID NO: 967 - RNA, 18 nt, Artificial Sequence
  Antisense oligonucleotide
  misc_feature (17)..(18): BNA scaffold modification
agccauuguguugaaucc

SEQ ID NO: 968 - RNA, 16 nt, Artificial Sequence
  Antisense oligonucleotide
ccauuguguugaaucc

SEQ ID NO: 969 - RNA, 16 nt, Artificial Sequence
  Antisense oligonucleotide
  misc_feature (1)..(1): BNA scaffold modification
ccauuguguugaaucc

SEQ ID NO: 970 - RNA, 16 nt, Artificial Sequence
  Antisense oligonucleotide
  misc_feature (16)..(16): BNA scaffold modification
ccauuguguugaaucc

SEQ ID NO: 971 - RNA, 16 nt, Artificial Sequence
  Antisense oligonucleotide
  misc_feature (1)..(1): BNA scaffold modification
  misc_feature (16)..(16): BNA scaffold modification
ccauuguguugaaucc

SEQ ID NO: 972 - RNA, 16 nt, Artificial Sequence
  Antisense oligonucleotide
  misc_feature (1)..(2): BNA scaffold modification
ccauuguguugaaucc

SEQ ID NO: 973 - RNA, 16 nt, Artificial Sequence
  Antisense oligonucleotide
  misc_feature (15)..(16): BNA scaffold modification
ccauuguguugaaucc

SEQ ID NO: 974 - RNA, 18 nt, Artificial Sequence
  Antisense oligonucleotide
uccagccauuguguugaa

SEQ ID NO: 975 - RNA, 18 nt, Artificial Sequence
  Antisense oligonucleotide
  misc_feature (1)..(1): BNA scaffold modification
tccagccauuguguugaa

SEQ ID NO: 976 - RNA, 18 nt, Artificial Sequence
  Antisense oligonucleotide
  misc_feature (18)..(18): BNA scaffold modification
uccagccauuguguugaa

SEQ ID NO: 977 - RNA, 18 nt, Artificial Sequence
  Antisense oligonucleotide
  misc_feature (1)..(1): BNA scaffold modification
  misc_feature (18)..(18): BNA scaffold modification
tccagccauuguguugaa

SEQ ID NO: 978 - RNA, 18 nt, Artificial Sequence
  Antisense oligonucleotide
  misc_feature (1)..(2): BNA scaffold modification
tccagccauuguguugaa

SEQ ID NO: 979 - RNA, 18 nt, Artificial Sequence
  Antisense oligonucleotide
  misc_feature (17)..(18): BNA scaffold modification
uccagccauuguguugaa

SEQ ID NO: 980 - RNA, 22 nt, Artificial Sequence
  Antisense oligonucleotide
ccuaagaccugcucagcuucuu

SEQ ID NO: 981 - RNA, 22 nt, Artificial Sequence
  Antisense oligonucleotide
  misc_feature (1)..(1): BNA scaffold modification
ccuaagaccugcucagcuucuu

SEQ ID NO: 982 - RNA, 22 nt, Artificial Sequence
  Antisense oligonucleotide
  misc_feature (22)..(22): BNA scaffold modification
ccuaagaccugcucagcuucut

SEQ ID NO: 983 - RNA, 22 nt, Artificial Sequence
  Antisense oligonucleotide
  misc_feature (1)..(1): BNA scaffold modification
  misc_feature (22)..(22): BNA scaffold modification
ccuaagaccugcucagcuucut

SEQ ID NO: 984 - RNA, 22 nt, Artificial Sequence
  Antisense oligonucleotide
  misc_feature (1)..(2): BNA scaffold modification
ccuaagaccugcucagcuucuu

SEQ ID NO: 985 - RNA, 22 nt, Artificial Sequence
  Antisense oligonucleotide
  misc_feature (21)..(22): BNA scaffold modification
ccuaagaccugcucagcuuctt

SEQ ID NO: 986 - RNA, 20 nt, Artificial Sequence
  Antisense oligonucleotide
ccuaagaccugcucagcuuc

SEQ ID NO: 987 - RNA, 20 nt, Artificial Sequence
  Antisense oligonucleotide
  misc_feature (1)..(1): BNA scaffold modification
ccuaagaccugcucagcuuc

SEQ ID NO: 988 - RNA, 20 nt, Artificial Sequence
  Antisense oligonucleotide
  misc_feature (20)..(20): BNA scaffold modification
ccuaagaccugcucagcuuc

SEQ ID NO: 989 - RNA, 20 nt, Artificial Sequence
  Antisense oligonucleotide
  misc_feature (1)..(1): BNA scaffold modification
  misc_feature (20)..(20): BNA scaffold modification
ccuaagaccugcucagcuuc

SEQ ID NO: 990 - RNA, 20 nt, Artificial Sequence
  Antisense oligonucleotide
  misc_feature (1)..(2): BNA scaffold modification
ccuaagaccugcucagcuuc

SEQ ID NO: 991 - RNA, 20 nt, Artificial Sequence
  Antisense oligonucleotide
  misc_feature (19)..(20): BNA scaffold modification
ccuaagaccugcucagcutc

SEQ ID NO: 992 - RNA, 18 nt, Artificial Sequence
  Antisense oligonucleotide
ccuaagaccugcucagcu

SEQ ID NO: 993 - RNA, 18 nt, Artificial Sequence
  Antisense oligonucleotide
  misc_feature (1)..(1): BNA scaffold modification
ccuaagaccugcucagcu

SEQ ID NO: 994 - RNA, 18 nt, Artificial Sequence
  Antisense oligonucleotide
  misc_feature (18)..(18): BNA scaffold modification
ccuaagaccugcucagct

SEQ ID NO: 995 - RNA, 18 nt, Artificial Sequence
  Antisense oligonucleotide
  misc_feature (1)..(1): BNA scaffold modification
  misc_feature (18)..(18): BNA scaffold modification
ccuaagaccugcucagct

SEQ ID NO: 996 - RNA, 18 nt, Artificial Sequence
  Antisense oligonucleotide
  misc_feature (1)..(2): BNA scaffold modification
ccuaagaccugcucagcu

SEQ ID NO: 997 - RNA, 18 nt, Artificial Sequence
  Antisense oligonucleotide
  misc_feature (17)..(18): BNA scaffold modification
ccuaagaccugcucagct

SEQ ID NO: 998 - RNA, 16 nt, Artificial Sequence
  Antisense oligonucleotide
ccuaagaccugcucag

SEQ ID NO: 999 - RNA, 16 nt, Artificial Sequence
  Antisense oligonucleotide
  misc_feature (1)..(1): BNA scaffold modification
ccuaagaccugcucag

SEQ ID NO: 1000 - RNA, 16 nt, Artificial Sequence
  Antisense oligonucleotide
  misc_feature (16)..(16): BNA scaffold modification
ccuaagaccugcucag

SEQ ID NO: 1001 - RNA, 16 nt, Artificial Sequence
  Antisense oligonucleotide
  misc_feature (1)..(1): BNA scaffold modification
  misc_feature (16)..(16): BNA scaffold modification
ccuaagaccugcucag

SEQ ID NO: 1002 - RNA, 16 nt, Artificial Sequence
  Antisense oligonucleotide
  misc_feature (1)..(2): BNA scaffold modification
ccuaagaccugcucag

SEQ ID NO: 1003 - RNA, 16 nt, Artificial Sequence
  Antisense oligonucleotide
  misc_feature (15)..(16): BNA scaffold modification
ccuaagaccugcucag

SEQ ID NO: 1004 - RNA, 20 nt, Artificial Sequence
  Antisense oligonucleotide
uaagaccugcucagcuucuu

SEQ ID NO: 1005 - RNA, 20 nt, Artificial Sequence
  Antisense oligonucleotide
  misc_feature (1)..(1): BNA scaffold modification
taagaccugcucagcuucuu

SEQ ID NO: 1006 - RNA, 20 nt, Artificial Sequence
  Antisense oligonucleotide
  misc_feature (20)..(20): BNA scaffold modification
uaagaccugcucagcuucut

SEQ ID NO: 1007 - RNA, 20 nt, Artificial Sequence
  Antisense oligonucleotide
  misc_feature (1)..(1): BNA scaffold modification
  misc_feature (20)..(20): BNA scaffold modification
taagaccugcucagcuucut

SEQ ID NO: 1008 - RNA, 20 nt, Artificial Sequence
  Antisense oligonucleotide
  misc_feature (1)..(2): BNA scaffold modification
taagaccugcucagcuucuu

SEQ ID NO: 1009 - RNA, 20 nt, Artificial Sequence
  Antisense oligonucleotide
  misc_feature (19)..(20): BNA scaffold modification
uaagaccugcucagcuuctt

SEQ ID NO: 1010 - RNA, 18 nt, Artificial Sequence
  Antisense oligonucleotide
agaccugcucagcuucuu

SEQ ID NO: 1011 - RNA, 18 nt, Artificial Sequence
  Antisense oligonucleotide
  misc_feature (1)..(1): BNA scaffold modification
agaccugcucagcuucuu

SEQ ID NO: 1012 - RNA, 18 nt, Artificial Sequence
  Antisense oligonucleotide
  misc_feature (18)..(18): BNA scaffold modification
agaccugcucagcuucut

SEQ ID NO: 1013 - RNA, 18 nt, Artificial Sequence
  Antisense oligonucleotide
  misc_feature (1)..(1): BNA scaffold modification
  misc_feature (18)..(18): BNA scaffold modification
agaccugcucagcuucut

SEQ ID NO: 1014 - RNA, 18 nt, Artificial Sequence
  Antisense oligonucleotide
  misc_feature (1)..(2): BNA scaffold modification
agaccugcucagcuucuu

SEQ ID NO: 1015 - RNA, 18 nt, Artificial Sequence
  Antisense oligonucleotide
  misc_feature (17)..(18): BNA scaffold modification
agaccugcucagcuuctt

SEQ ID NO: 1016 - RNA, 16 nt, Artificial Sequence
  Antisense oligonucleotide
accugcucagcuucuu

SEQ ID NO: 1017 - RNA, 16 nt, Artificial Sequence
  Antisense oligonucleotide
  misc_feature (1)..(1): BNA scaffold modification
accugcucagcuucuu

SEQ ID NO: 1018 - RNA, 16 nt, Artificial Sequence
  Antisense oligonucleotide
  misc_feature (16)..(16): BNA scaffold modification
accugcucagcuucut

SEQ ID NO: 1019 - RNA, 16 nt, Artificial Sequence
  Antisense oligonucleotide
  misc_feature (1)..(1): BNA scaffold modification
  misc_feature (16)..(16): BNA scaffold modification
accugcucagcuucut

SEQ ID NO: 1020 - RNA, 16 nt, Artificial Sequence
  Antisense oligonucleotide
  misc_feature (1)..(2): BNA scaffold modification
accugcucagcuucuu

SEQ ID NO: 1021 - RNA, 16 nt, Artificial Sequence
  Antisense oligonucleotide
  misc_feature (15)..(16): BNA scaffold modification
accugcucagcuuctt

SEQ ID NO: 1022 - RNA, 18 nt, Artificial Sequence
  Antisense oligonucleotide
uaagaccugcucagcuuc

SEQ ID NO: 1023 - RNA, 18 nt, Artificial Sequence
  Antisense oligonucleotide
  misc_feature (1)..(1): BNA scaffold modification
taagaccugcucagcuuc

SEQ ID NO: 1024 - RNA, 18 nt, Artificial Sequence
  Antisense oligonucleotide
  misc_feature (18)..(18): BNA scaffold modification
uaagaccugcucagcuuc

SEQ ID NO: 1025 - RNA, 18 nt, Artificial Sequence
  Antisense oligonucleotide
  misc_feature (1)..(1): BNA scaffold modification
  misc_feature (18)..(18): BNA scaffold modification
taagaccugcucagcuuc

SEQ ID NO: 1026 - RNA, 18 nt, Artificial Sequence
  Antisense oligonucleotide
  misc_feature (1)..(2): BNA scaffold modification
taagaccugcucagcuuc

SEQ ID NO: 1027 - RNA, 18 nt, Artificial Sequence
  Antisense oligonucleotide
  misc_feature (17)..(18): BNA scaffold modification
uaagaccugcucagcutc

SEQ ID NO: 1028 - RNA, 22 nt, Artificial Sequence
  Antisense oligonucleotide
gaccugcucagcuucuuccuua

SEQ ID NO: 1029 - RNA, 22 nt, Artificial Sequence
  Antisense oligonucleotide
  misc_feature (1)..(1): BNA scaffold modification
gaccugcucagcuucuuccuua

SEQ ID NO: 1030 - RNA, 22 nt, Artificial Sequence
  Antisense oligonucleotide
  misc_feature (22)..(22): BNA scaffold modification
gaccugcucagcuucuuccuua

SEQ ID NO: 1031 - RNA, 22 nt, Artificial Sequence
  Antisense oligonucleotide
  misc_feature (1)..(1): BNA scaffold modification
  misc_feature (22)..(22): BNA scaffold modification
gaccugcucagcuucuuccuua

SEQ ID NO: 1032 - RNA, 22 nt, Artificial Sequence
  Antisense oligonucleotide
  misc_feature (1)..(2): BNA scaffold modification
gaccugcucagcuucuuccuua

SEQ ID NO: 1033 - RNA, 22 nt, Artificial Sequence
  Antisense oligonucleotide
  misc_feature (21)..(22): BNA scaffold modification
gaccugcucagcuucuuccuta

SEQ ID NO: 1034 - RNA, 20 nt, Artificial Sequence
  Antisense oligonucleotide
gaccugcucagcuucuuccu

SEQ ID NO: 1035 - RNA, 20 nt, Artificial Sequence
  Antisense oligonucleotide
  misc_feature (1)..(1): BNA scaffold modification
gaccugcucagcuucuuccu

SEQ ID NO: 1036 - RNA, 20 nt, Artificial Sequence
  Antisense oligonucleotide
  misc_feature (20)..(20): BNA scaffold modification
gaccugcucagcuucuucct

SEQ ID NO: 1037 - RNA, 20 nt, Artificial Sequence
  Antisense oligonucleotide
  misc_feature (1)..(1): BNA scaffold modification
  misc_feature (20)..(20): BNA scaffold modification
gaccugcucagcuucuucct

SEQ ID NO: 1038 - RNA, 20 nt, Artificial Sequence
  Antisense oligonucleotide
  misc_feature (1)..(2): BNA scaffold modification
gaccugcucagcuucuuccu

SEQ ID NO: 1039 - RNA, 20 nt, Artificial Sequence
  Antisense oligonucleotide
  misc_feature (19)..(20): BNA scaffold modification
gaccugcucagcuucuucct

SEQ ID NO: 1040 - RNA, 18 nt, Artificial Sequence
  Antisense oligonucleotide
gaccugcucagcuucuuc

SEQ ID NO: 1041 - RNA, 18 nt, Artificial Sequence
  Antisense oligonucleotide
  misc_feature (1)..(1): BNA scaffold modification
gaccugcucagcuucuuc

SEQ ID NO: 1042 - RNA, 18 nt, Artificial Sequence
  Antisense oligonucleotide
  misc_feature (18)..(18): BNA scaffold modification
gaccugcucagcuucuuc

SEQ ID NO: 1043 - RNA, 18 nt, Artificial Sequence
  Antisense oligonucleotide
  misc_feature (1)..(1): BNA scaffold modification
  misc_feature (18)..(18): BNA scaffold modification
gaccugcucagcuucuuc

SEQ ID NO: 1044 - RNA, 18 nt, Artificial Sequence
  Antisense oligonucleotide
  misc_feature (1)..(2): BNA scaffold modification
gaccugcucagcuucuuc

SEQ ID NO: 1045 - RNA, 18 nt, Artificial Sequence
  Antisense oligonucleotide
  misc_feature (17)..(18): BNA scaffold modification
gaccugcucagcuucutc

SEQ ID NO: 1046 - RNA, 16 nt, Artificial Sequence
  Antisense oligonucleotide
gaccugcucagcuucu

SEQ ID NO: 1047 - RNA, 16 nt, Artificial Sequence
  Antisense oligonucleotide
  misc_feature (1)..(1): BNA scaffold modification
gaccugcucagcuucu

SEQ ID NO: 1048 - RNA, 16 nt, Artificial Sequence
  Antisense oligonucleotide
  misc_feature (16)..(16): BNA scaffold modification
gaccugcucagcuuct

SEQ ID NO: 1049 - RNA, 16 nt, Artificial Sequence
  Antisense oligonucleotide
  misc_feature (1)..(1): BNA scaffold modification
  misc_feature (16)..(16): BNA scaffold modification
gaccugcucagcuuct

SEQ ID NO: 1050 - RNA, 16 nt, Artificial Sequence
  Antisense oligonucleotide
  misc_feature (1)..(2): BNA scaffold modification
gaccugcucagcuucu

SEQ ID NO: 1051 - RNA, 16 nt, Artificial Sequence
  Antisense oligonucleotide
  misc_feature (15)..(16): BNA scaffold modification
gaccugcucagcuuct

SEQ ID NO: 1052 - RNA, 20 nt, Artificial Sequence
  Antisense oligonucleotide
ccugcucagcuucuuccuua

SEQ ID NO: 1053 - RNA, 20 nt, Artificial Sequence
  Antisense oligonucleotide
  misc_feature (1)..(1): BNA scaffold modification
ccugcucagcuucuuccuua

SEQ ID NO: 1054 - RNA, 20 nt, Artificial Sequence
  Antisense oligonucleotide
  misc_feature (20)..(20): BNA scaffold modification
ccugcucagcuucuuccuua

SEQ ID NO: 1055 - RNA, 20 nt, Artificial Sequence
  Antisense oligonucleotide
  misc_feature (1)..(1): BNA scaffold modification
  misc_feature (20)..(20): BNA scaffold modification
ccugcucagcuucuuccuua

SEQ ID NO: 1056 - RNA, 20 nt, Artificial Sequence
  Antisense oligonucleotide
  misc_feature (1)..(2): BNA scaffold modification
ccugcucagcuucuuccuua

SEQ ID NO: 1057 - RNA, 20 nt, Artificial Sequence
  Antisense oligonucleotide
  misc_feature (19)..(20): BNA scaffold modification
ccugcucagcuucuuccuta

SEQ ID NO: 1058 - RNA, 18 nt, Artificial Sequence
  Antisense oligonucleotide
ugcucagcuucuuccuua

SEQ ID NO: 1059 - RNA, 18 nt, Artificial Sequence
  Antisense oligonucleotide
  misc_feature (1)..(1): BNA scaffold modification
tgcucagcuucuuccuua

SEQ ID NO: 1060 - RNA, 18 nt, Artificial Sequence
  Antisense oligonucleotide
  misc_feature (18)..(18): BNA scaffold modification
ugcucagcuucuuccuua

SEQ ID NO: 1061 - RNA, 18 nt, Artificial Sequence
  Antisense oligonucleotide
  misc_feature (1)..(1): BNA scaffold modification
  misc_feature (18)..(18): BNA scaffold modification
tgcucagcuucuuccuua

SEQ ID NO: 1062 - RNA, 18 nt, Artificial Sequence
  Antisense oligonucleotide
  misc_feature (1)..(2): BNA scaffold modification
tgcucagcuucuuccuua

SEQ ID NO: 1063 - RNA, 18 nt, Artificial Sequence
  Antisense oligonucleotide
  misc_feature (17)..(18): BNA scaffold modification
ugcucagcuucuuccuta

SEQ ID NO: 1064 - RNA, 16 nt, Artificial Sequence
  Antisense oligonucleotide
cucagcuucuuccuua

SEQ ID NO: 1065 - RNA, 16 nt, Artificial Sequence
  Antisense oligonucleotide
  misc_feature (1)..(1): BNA scaffold modification
cucagcuucuuccuua

SEQ ID NO: 1066 - RNA, 16 nt, Artificial Sequence
  Antisense oligonucleotide
  misc_feature (16)..(16): BNA scaffold modification
cucagcuucuuccuua

SEQ ID NO: 1067 - RNA, 16 nt, Artificial Sequence
  Antisense oligonucleotide
  misc_feature (1)..(1): BNA scaffold modification
  misc_feature (16)..(16): BNA scaffold modification
cucagcuucuuccuua

SEQ ID NO: 1068 - RNA, 16 nt, Artificial Sequence
  Antisense oligonucleotide
  misc_feature (1)..(2): BNA scaffold modification
ctcagcuucuuccuua

SEQ ID NO: 1069 - RNA, 16 nt, Artificial Sequence
  Antisense oligonucleotide
  misc_feature (15)..(16): BNA scaffold modification
cucagcuucuuccuta

SEQ ID NO: 1070 - RNA, 18 nt, Artificial Sequence
  Antisense oligonucleotide
ccugcucagcuucuuccu

SEQ ID NO: 1071 - RNA, 18 nt, Artificial Sequence
  Antisense oligonucleotide
  misc_feature (1)..(1): BNA scaffold modification
ccugcucagcuucuuccu

SEQ ID NO: 1072 - RNA, 18 nt, Artificial Sequence
  Antisense oligonucleotide
  misc_feature (18)..(18): BNA scaffold modification
ccugcucagcuucuucct

SEQ ID NO: 1073 - RNA, 18 nt, Artificial Sequence
  Antisense oligonucleotide
  misc_feature (1)..(1): BNA scaffold modification
  misc_feature (18)..(18): BNA scaffold modification
ccugcucagcuucuucct

SEQ ID NO: 1074 - RNA, 18 nt, Artificial Sequence
  Antisense oligonucleotide
  misc_feature (1)..(2): BNA scaffold modification
ccugcucagcuucuuccu

SEQ ID NO: 1075 - RNA, 18 nt, Artificial Sequence
  Antisense oligonucleotide
  misc_feature (17)..(18): BNA scaffold modification
ccugcucagcuucuucct

SEQ ID NO: 1076 - RNA, 22 nt, Artificial Sequence
  Antisense oligonucleotide
gcucagcuucuuccuuagcuuc

SEQ ID NO: 1077 - RNA, 22 nt, Artificial Sequence
  Antisense oligonucleotide
  misc_feature (1)..(1): BNA scaffold modification
gcucagcuucuuccuuagcuuc

SEQ ID NO: 1078 - RNA, 22 nt, Artificial Sequence
  Antisense oligonucleotide
  misc_feature (22)..(22): BNA scaffold modification
gcucagcuucuuccuuagcuuc

SEQ ID NO: 1079 - RNA, 22 nt, Artificial Sequence
  Antisense oligonucleotide
  misc_feature (1)..(1): BNA scaffold modification
  misc_feature (22)..(22): BNA scaffold modification
gcucagcuucuuccuuagcuuc

SEQ ID NO: 1080 - RNA, 22 nt, Artificial Sequence
  Antisense oligonucleotide
  misc_feature (1)..(2): BNA scaffold modification
gcucagcuucuuccuuagcuuc

SEQ ID NO: 1081 - RNA, 22 nt, Artificial Sequence
  Antisense oligonucleotide
  misc_feature (21)..(22): BNA scaffold modification
gcucagcuucuuccuuagcutc

SEQ ID NO: 1082 - RNA, 20 nt, Artificial Sequence
  Antisense oligonucleotide
gcucagcuucuuccuuagcu

SEQ ID NO: 1083 - RNA, 20 nt, Artificial Sequence
  Antisense oligonucleotide
  misc_feature (1)..(1): BNA scaffold modification
gcucagcuucuuccuuagcu

SEQ ID NO: 1084 - RNA, 20 nt, Artificial Sequence
  Antisense oligonucleotide
  misc_feature (20)..(20): BNA scaffold modification
gcucagcuucuuccuuagct

SEQ ID NO: 1085 - RNA, 20 nt, Artificial Sequence
  Antisense oligonucleotide
  misc_feature (1)..(1): BNA scaffold modification
  misc_feature (20)..(20): BNA scaffold modification
gcucagcuucuuccuuagct

SEQ ID NO: 1086 - RNA, 20 nt, Artificial Sequence
  Antisense oligonucleotide
  misc_feature (1)..(2): BNA scaffold modification
gcucagcuucuuccuuagcu

SEQ ID NO: 1087 - RNA, 20 nt, Artificial Sequence
  Antisense oligonucleotide
  misc_feature (19)..(20): BNA scaffold modification
gcucagcuucuuccuuagct

SEQ ID NO: 1088 - RNA, 18 nt, Artificial Sequence
  Antisense oligonucleotide
gcucagcuucuuccuuag

SEQ ID NO: 1089 - RNA, 18 nt, Artificial Sequence
  Antisense oligonucleotide
  misc_feature (1)..(1): BNA scaffold modification
gcucagcuucuuccuuag

SEQ ID NO: 1090 - RNA, 18 nt, Artificial Sequence
  Antisense oligonucleotide
  misc_feature (18)..(18): BNA scaffold modification
gcucagcuucuuccuuag

SEQ ID NO: 1091 - RNA, 18 nt, Artificial Sequence
  Antisense oligonucleotide
  misc_feature (1)..(1): BNA scaffold modification
  misc_feature (18)..(18): BNA scaffold modification
gcucagcuucuuccuuag

SEQ ID NO: 1092 - RNA, 18 nt, Artificial Sequence
  Antisense oligonucleotide
  misc_feature (1)..(2): BNA scaffold modification
gcucagcuucuuccuuag

SEQ ID NO: 1093 - RNA, 18 nt, Artificial Sequence
  Antisense oligonucleotide
  misc_feature (17)..(18): BNA scaffold modification
gcucagcuucuuccuuag

SEQ ID NO: 1094 - RNA, 16 nt, Artificial Sequence
  Antisense oligonucleotide
gcucagcuucuuccuu

SEQ ID NO: 1095 - RNA, 16 nt, Artificial Sequence
  Antisense oligonucleotide
  misc_feature (1)..(1): BNA scaffold modification
gcucagcuucuuccuu

SEQ ID NO: 1096 - RNA, 16 nt, Artificial Sequence
  Antisense oligonucleotide
  misc_feature (16)..(16): BNA scaffold modification
gcucagcuucuuccut

SEQ ID NO: 1097 - RNA, 16 nt, Artificial Sequence
  Antisense oligonucleotide
  misc_feature (1)..(1): BNA scaffold modification
  misc_feature (16)..(16): BNA scaffold modification
gcucagcuucuuccut

SEQ ID NO: 1098 - RNA, 16 nt, Artificial Sequence
  Antisense oligonucleotide
  misc_feature (1)..(2): BNA scaffold modification
gcucagcuucuuccuu

SEQ ID NO: 1099 - RNA, 16 nt, Artificial Sequence
  Antisense oligonucleotide
  misc_feature (15)..(16): BNA scaffold modification
gcucagcuucuucctt

SEQ ID NO: 1100 - RNA, 20 nt, Artificial Sequence
  Antisense oligonucleotide
ucagcuucuuccuuagcuuc

SEQ ID NO: 1101 - RNA, 20 nt, Artificial Sequence
  Antisense oligonucleotide
  misc_feature (1)..(1): BNA scaffold modification
tcagcuucuuccuuagcuuc

SEQ ID NO: 1102 - RNA, 20 nt, Artificial Sequence
  Antisense oligonucleotide
  misc_feature (20)..(20): BNA scaffold modification
ucagcuucuuccuuagcuuc

SEQ ID NO: 1103 - RNA, 20 nt, Artificial Sequence
  Antisense oligonucleotide
  misc_feature (1)..(1): BNA scaffold modification
  misc_feature (20)..(20): BNA scaffold modification
tcagcuucuuccuuagcuuc

SEQ ID NO: 1104 - RNA, 20 nt, Artificial Sequence
  Antisense oligonucleotide
  misc_feature (1)..(2): BNA scaffold modification
tcagcuucuuccuuagcuuc

SEQ ID NO: 1105 - RNA, 20 nt, Artificial Sequence
  Antisense oligonucleotide
  misc_feature (19)..(20): BNA scaffold modification
ucagcuucuuccuuagcutc

SEQ ID NO: 1106 - RNA, 18 nt, Artificial Sequence
  Antisense oligonucleotide
agcuucuuccuuagcuuc

SEQ ID NO: 1107 - RNA, 18 nt, Artificial Sequence
  Antisense oligonucleotide
  misc_feature (1)..(1): BNA scaffold modification
agcuucuuccuuagcuuc

SEQ ID NO: 1108 - RNA, 18 nt, Artificial Sequence
  Antisense oligonucleotide
  misc_feature (18)..(18): BNA scaffold modification
agcuucuuccuuagcuuc

SEQ ID NO: 1109 - RNA, 18 nt, Artificial Sequence
  Antisense oligonucleotide
  misc_feature (1)..(1): BNA scaffold modification
  misc_feature (18)..(18): BNA scaffold modification
agcuucuuccuuagcuuc

SEQ ID NO: 1110 - RNA, 18 nt, Artificial Sequence
  Antisense oligonucleotide
  misc_feature (1)..(2): BNA scaffold modification
agcuucuuccuuagcuuc

SEQ ID NO: 1111 - RNA, 18 nt, Artificial Sequence
  Antisense oligonucleotide
  misc_feature (17)..(18): BNA scaffold modification
agcuucuuccuuagcutc

SEQ ID NO: 1112 - RNA, 16 nt, Artificial Sequence
  Antisense oligonucleotide
cuucuuccuuagcuuc

SEQ ID NO: 1113 - RNA, 16 nt, Artificial Sequence
  Antisense oligonucleotide
  misc_feature (1)..(1): BNA scaffold modification
cuucuuccuuagcuuc

SEQ ID NO: 1114 - RNA, 16 nt, Artificial Sequence
  Antisense oligonucleotide
  misc_feature (16)..(16): BNA scaffold modification
cuucuuccuuagcuuc

SEQ ID NO: 1115 - RNA, 16 nt, Artificial Sequence
  Antisense oligonucleotide
  misc_feature (1)..(1): BNA scaffold modification
  misc_feature (16)..(16): BNA scaffold modification
cuucuuccuuagcuuc

SEQ ID NO: 1116 - RNA, 16 nt, Artificial Sequence
  Antisense oligonucleotide
  misc_feature (1)..(2): BNA scaffold modification
ctucuuccuuagcuuc

SEQ ID NO: 1117 - RNA, 16 nt, Artificial Sequence
  Antisense oligonucleotide
  misc_feature (15)..(16): BNA scaffold modification
cuucuuccuuagcutc

SEQ ID NO: 1118 - RNA, 18 nt, Artificial Sequence
  Antisense oligonucleotide
ucagcuucuuccuuagcu

SEQ ID NO: 1119 - RNA, 18 nt, Artificial Sequence
  Antisense oligonucleotide
  misc_feature (1)..(1): BNA scaffold modification
tcagcuucuuccuuagcu

SEQ ID NO: 1120 - RNA, 18 nt, Artificial Sequence
  Antisense oligonucleotide
  misc_feature (18)..(18): BNA scaffold modification
ucagcuucuuccuuagct

SEQ ID NO: 1121 - RNA, 18 nt, Artificial Sequence
  Antisense oligonucleotide
  misc_feature (1)..(1): BNA scaffold modification
  misc_feature (18)..(18): BNA scaffold modification
tcagcuucuuccuuagct

SEQ ID NO: 1122 - RNA, 18 nt, Artificial Sequence
  Antisense oligonucleotide
  misc_feature (1)..(2): BNA scaffold modification
tcagcuucuuccuuagcu

SEQ ID NO: 1123 - RNA, 18 nt, Artificial Sequence
  Antisense oligonucleotide
  misc_feature (17)..(18): BNA scaffold modification
ucagcuucuuccuuagct

SEQ ID NO: 1124 - RNA, 21 nt, Artificial Sequence
  Antisense oligonucleotide
ccacugauucugaauucuuuc

SEQ ID NO: 1125 - RNA, 21 nt, Artificial Sequence
  Antisense oligonucleotide
  misc_feature (1)..(1): BNA scaffold modification
ccacugauucugaauucuuuc

SEQ ID NO: 1126 - RNA, 21 nt, Artificial Sequence
  Antisense oligonucleotide
  misc_feature (21)..(21): BNA scaffold modification
ccacugauucugaauucuuuc

SEQ ID NO: 1127 - RNA, 21 nt, Artificial Sequence
  Antisense oligonucleotide
  misc_feature (1)..(1): BNA scaffold modification
  misc_feature (21)..(21): BNA scaffold modification
ccacugauucugaauucuuuc

SEQ ID NO: 1128 - RNA, 21 nt, Artificial Sequence
  Antisense oligonucleotide
  misc_feature (1)..(2): BNA scaffold modification
ccacugauucugaauucuuuc

SEQ ID NO: 1129 - RNA, 21 nt, Artificial Sequence
  Antisense oligonucleotide
  misc_feature (20)..(21): BNA scaffold modification
ccacugauucugaauucuutc

SEQ ID NO: 1130 - RNA, 18 nt, Artificial Sequence
  Antisense oligonucleotide
ccacugauucugaauucu

SEQ ID NO: 1131 - RNA, 18 nt, Artificial Sequence
  Antisense oligonucleotide
  misc_feature (1)..(1): BNA scaffold modification
ccacugauucugaauucu

SEQ ID NO: 1132 - RNA, 18 nt, Artificial Sequence
  Antisense oligonucleotide
  misc_feature (18)..(18): BNA scaffold modification
ccacugauucugaauuct

SEQ ID NO: 1133 - RNA, 18 nt, Artificial Sequence
  Antisense oligonucleotide
  misc_feature (1)..(1): BNA scaffold modification
  misc_feature (18)..(18): BNA scaffold modification
ccacugauucugaauuct

SEQ ID NO: 1134 - RNA, 18 nt, Artificial Sequence
  Antisense oligonucleotide
  misc_feature (1)..(2): BNA scaffold modification
ccacugauucugaauucu

SEQ ID NO: 1135 - RNA, 18 nt, Artificial Sequence
  Antisense oligonucleotide
  misc_feature (17)..(18): BNA scaffold modification
ccacugauucugaauuct

SEQ ID NO: 1136 - RNA, 16 nt, Artificial Sequence
  Antisense oligonucleotide
ccacugauucugaauu

SEQ ID NO: 1137 - RNA, 16 nt, Artificial Sequence
  Antisense oligonucleotide
  misc_feature (1)..(1): BNA scaffold modification
ccacugauucugaauu

SEQ ID NO: 1138 - RNA, 16 nt, Artificial Sequence
  Antisense oligonucleotide
  misc_feature (16)..(16): BNA scaffold modification
ccacugauucugaaut

SEQ ID NO: 1139 - RNA, 16 nt, Artificial Sequence
  Antisense oligonucleotide
  misc_feature (1)..(1): BNA scaffold modification
  misc_feature (16)..(16): BNA scaffold modification
ccacugauucugaaut

SEQ ID NO: 1140 - RNA, 16 nt, Artificial Sequence
  Antisense oligonucleotide
  misc_feature (1)..(2): BNA scaffold modification
ccacugauucugaauu

SEQ ID NO: 1141 - RNA, 16 nt, Artificial Sequence
  Antisense oligonucleotide
  misc_feature (15)..(16): BNA scaffold modification
ccacugauucugaatt

SEQ ID NO: 1142 - RNA, 18 nt, Artificial Sequence
  Antisense oligonucleotide
cugauucugaauucuuuc

SEQ ID NO: 1143 - RNA, 18 nt, Artificial Sequence
  Antisense oligonucleotide
  misc_feature (1)..(1): BNA scaffold modification
cugauucugaauucuuuc

SEQ ID NO: 1144 - RNA, 18 nt, Artificial Sequence
  Antisense oligonucleotide
  misc_feature (18)..(18): BNA scaffold modification
cugauucugaauucuuuc

SEQ ID NO: 1145 - RNA, 18 nt, Artificial Sequence
  Antisense oligonucleotide
  misc_feature (1)..(1): BNA scaffold modification
  misc_feature (18)..(18): BNA scaffold modification
cugauucugaauucuuuc

SEQ ID NO: 1146 - RNA, 18 nt, Artificial Sequence
  Antisense oligonucleotide
  misc_feature (1)..(2): BNA scaffold modification
ctgauucugaauucuuuc

SEQ ID NO: 1147 - RNA, 18 nt, Artificial Sequence
  Antisense oligonucleotide
  misc_feature (17)..(18): BNA scaffold modification
cugauucugaauucuutc

SEQ ID NO: 1148 - RNA, 16 nt, Artificial Sequence
  Antisense oligonucleotide
gauucugaauucuuuc

SEQ ID NO: 1149 - RNA, 16 nt, Artificial Sequence
  Antisense oligonucleotide
  misc_feature (1)..(1): BNA scaffold modification
gauucugaauucuuuc

SEQ ID NO: 1150 - RNA, 16 nt, Artificial Sequence
  Antisense oligonucleotide
  misc_feature (16)..(16): BNA scaffold modification
gauucugaauucuuuc

SEQ ID NO: 1151 - RNA, 16 nt, Artificial Sequence
  Antisense oligonucleotide
  misc_feature (1)..(1): BNA scaffold modification
  misc_feature (16)..(16): BNA scaffold modification
gauucugaauucuuuc

SEQ ID NO: 1152 - RNA, 16 nt, Artificial Sequence
  Antisense oligonucleotide
  misc_feature (1)..(2): BNA scaffold modification
gauucugaauucuuuc

SEQ ID NO: 1153 - RNA, 16 nt, Artificial Sequence
  Antisense oligonucleotide
  misc_feature (15)..(16): BNA scaffold modification
gauucugaauucuutc

SEQ ID NO: 1154 - RNA, 18 nt, Artificial Sequence
  Antisense oligonucleotide
cacugauucugaauucuu

SEQ ID NO: 1155 - RNA, 18 nt, Artificial Sequence
  Antisense oligonucleotide
  misc_feature (1)..(1): BNA scaffold modification
cacugauucugaauucuu

SEQ ID NO: 1156 - RNA, 18 nt, Artificial Sequence
  Antisense oligonucleotide
  misc_feature (18)..(18): BNA scaffold modification
cacugauucugaauucut

SEQ ID NO: 1157 - RNA, 18 nt, Artificial Sequence
  Antisense oligonucleotide
  misc_feature (1)..(1): BNA scaffold modification
  misc_feature (18)..(18): BNA scaffold modification
cacugauucugaauucut

SEQ ID NO: 1158 - RNA, 18 nt, Artificial Sequence
  Antisense oligonucleotide
  misc_feature (1)..(2): BNA scaffold modification
cacugauucugaauucuu

SEQ ID NO: 1159 - RNA, 18 nt, Artificial Sequence
  Antisense oligonucleotide
  misc_feature (17)..(18): BNA scaffold modification
cacugauucugaauuctt

SEQ ID NO: 1160 - RNA, 24 nt, Artificial Sequence
  Antisense oligonucleotide
gaguuucuuccaaagcagccucuc

SEQ ID NO: 1161 - RNA, 24 nt, Artificial Sequence
  Antisense oligonucleotide
  misc_feature (1)..(1): BNA scaffold modification
gaguuucuuccaaagcagccucuc

SEQ ID NO: 1162 - RNA, 24 nt, Artificial Sequence
  Antisense oligonucleotide
  misc_feature (24)..(24): BNA scaffold modification
gaguuucuuccaaagcagccucuc

SEQ ID NO: 1163 - RNA, 24 nt, Artificial Sequence
  Antisense oligonucleotide
  misc_feature (1)..(1): BNA scaffold modification
  misc_feature (24)..(24): BNA scaffold modification
gaguuucuuccaaagcagccucuc

SEQ ID NO: 1164 - RNA, 24 nt, Artificial Sequence
  Antisense oligonucleotide
  misc_feature (1)..(2): BNA scaffold modification
gaguuucuuccaaagcagccucuc

SEQ ID NO: 1165 - RNA, 24 nt, Artificial Sequence
  Antisense oligonucleotide
  misc_feature (23)..(24): BNA scaffold modification
gaguuucuuccaaagcagccuctc

SEQ ID NO: 1166 - RNA, 22 nt, Artificial Sequence
  Antisense oligonucleotide
gaguuucuuccaaagcagccuc

SEQ ID NO: 1167 - RNA, 22 nt, Artificial Sequence
  Antisense oligonucleotide
  misc_feature (1)..(1): BNA scaffold modification
gaguuucuuccaaagcagccuc

SEQ ID NO: 1168 - RNA, 22 nt, Artificial Sequence
  Antisense oligonucleotide
  misc_feature (22)..(22): BNA scaffold modification
gaguuucuuccaaagcagccuc

SEQ ID NO: 1169 - RNA, 22 nt, Artificial Sequence
  Antisense oligonucleotide
  misc_feature (1)..(1): BNA scaffold modification
  misc_feature (22)..(22): BNA scaffold modification
gaguuucuuccaaagcagccuc

SEQ ID NO: 1170 - RNA, 22 nt, Artificial Sequence
  Antisense oligonucleotide
  misc_feature (1)..(2): BNA scaffold modification
gaguuucuuccaaagcagccuc

SEQ ID NO: 1171 - RNA, 22 nt, Artificial Sequence
  Antisense oligonucleotide
  misc_feature (21)..(22): BNA scaffold modification
gaguuucuuccaaagcagcctc

SEQ ID NO: 1172 - RNA, 20 nt, Artificial Sequence
  Antisense oligonucleotide
gaguuucuuccaaagcagcc

SEQ ID NO: 1173 - RNA, 20 nt, Artificial Sequence
  Antisense oligonucleotide
  misc_feature (1)..(1): BNA scaffold modification
gaguuucuuccaaagcagcc

SEQ ID NO: 1174 - RNA, 20 nt, Artificial Sequence
  Antisense oligonucleotide
  misc_feature (20)..(20): BNA scaffold modification
gaguuucuuccaaagcagcc

SEQ ID NO: 1175 - RNA, 20 nt, Artificial Sequence
  Antisense oligonucleotide
  misc_feature (1)..(1): BNA scaffold modification
  misc_feature (20)..(20): BNA scaffold modification
gaguuucuuccaaagcagcc

SEQ ID NO: 1176 - RNA, 20 nt, Artificial Sequence
  Antisense oligonucleotide
  misc_feature (1)..(2): BNA scaffold modification
gaguuucuuccaaagcagcc

SEQ ID NO: 1177 - RNA, 20 nt, Artificial Sequence
  Antisense oligonucleotide
  misc_feature (19)..(20): BNA scaffold modification
gaguuucuuccaaagcagcc

SEQ ID NO: 1178 - RNA, 18 nt, Artificial Sequence
  Antisense oligonucleotide
gaguuucuuccaaagcag

SEQ ID NO: 1179 - RNA, 18 nt, Artificial Sequence
  Antisense oligonucleotide
  misc_feature (1)..(1): BNA scaffold modification
gaguuucuuccaaagcag

SEQ ID NO: 1180 - RNA, 18 nt, Artificial Sequence
  Antisense oligonucleotide
  misc_feature (18)..(18): BNA scaffold modification
gaguuucuuccaaagcag

SEQ ID NO: 1181 - RNA, 18 nt, Artificial Sequence
  Antisense oligonucleotide
  misc_feature (1)..(1): BNA scaffold modification
  misc_feature (18)..(18): BNA scaffold modification
gaguuucuuccaaagcag

SEQ ID NO: 1182 - RNA, 18 nt, Artificial Sequence
  Antisense oligonucleotide
  misc_feature (1)..(2): BNA scaffold modification
gaguuucuuccaaagcag

SEQ ID NO: 1183 - RNA, 18 nt, Artificial Sequence
  Antisense oligonucleotide
  misc_feature (17)..(18): BNA scaffold modification
gaguuucuuccaaagcag

SEQ ID NO: 1184 - RNA, 16 nt, Artificial Sequence
  Antisense oligonucleotide
gaguuucuuccaaagc

SEQ ID NO: 1185 - RNA, 16 nt, Artificial Sequence
  Antisense oligonucleotide
  misc_feature (1)..(1): BNA scaffold modification
gaguuucuuccaaagc

SEQ ID NO: 1186 - RNA, 16 nt, Artificial Sequence
  Antisense oligonucleotide
  misc_feature (16)..(16): BNA scaffold modification
gaguuucuuccaaagc

SEQ ID NO: 1187 - RNA, 16 nt, Artificial Sequence
  Antisense oligonucleotide
  misc_feature (1)..(1): BNA scaffold modification
  misc_feature (16)..(16): BNA scaffold modification
gaguuucuuccaaagc

SEQ ID NO: 1188 - RNA, 16 nt, Artificial Sequence
  Antisense oligonucleotide
  misc_feature (1)..(2): BNA scaffold modification
gaguuucuuccaaagc

SEQ ID NO: 1189 - RNA, 16 nt, Artificial Sequence
  Antisense oligonucleotide
  misc_feature (15)..(16): BNA scaffold modification
gaguuucuuccaaagc

SEQ ID NO: 1190 - RNA, 22 nt, Artificial Sequence
  Antisense oligonucleotide
guuucuuccaaagcagccucuc

SEQ ID NO: 1191 - RNA, 22 nt, Artificial Sequence
  Antisense oligonucleotide
  misc_feature (1)..(1): BNA scaffold modification
guuucuuccaaagcagccucuc

SEQ ID NO: 1192 - RNA, 22 nt, Artificial Sequence
  Antisense oligonucleotide
  misc_feature (22)..(22): BNA scaffold modification
guuucuuccaaagcagccucuc

SEQ ID NO: 1193 - RNA, 22 nt, Artificial Sequence
  Antisense oligonucleotide
  misc_feature (1)..(1): BNA scaffold modification
  misc_feature (22)..(22): BNA scaffold modification
guuucuuccaaagcagccucuc

SEQ ID NO: 1194 - RNA, 22 nt, Artificial Sequence
  Antisense oligonucleotide
  misc_feature (1)..(2): BNA scaffold modification
gtuucuuccaaagcagccucuc

SEQ ID NO: 1195 - RNA, 22 nt, Artificial Sequence
  Antisense oligonucleotide
  misc_feature (21)..(22): BNA scaffold modification
guuucuuccaaagcagccuctc

SEQ ID NO: 1196 - RNA, 20 nt, Artificial Sequence
  Antisense oligonucleotide
uucuuccaaagcagccucuc

SEQ ID NO: 1197 - RNA, 20 nt, Artificial Sequence
  Antisense oligonucleotide
  misc_feature (1)..(1): BNA scaffold modification
tucuuccaaagcagccucuc

SEQ ID NO: 1198 - RNA, 20 nt, Artificial Sequence
  Antisense oligonucleotide
  misc_feature (20)..(20): BNA scaffold modification
uucuuccaaagcagccucuc

SEQ ID NO: 1199 - RNA, 20 nt, Artificial Sequence
  Antisense oligonucleotide
  misc_feature (1)..(1): BNA scaffold modification
  misc_feature (20)..(20): BNA scaffold modification
tucuuccaaagcagccucuc

SEQ ID NO: 1200 - RNA, 20 nt, Artificial Sequence
  Antisense oligonucleotide
  misc_feature (1)..(2): BNA scaffold modification
ttcuuccaaagcagccucuc

SEQ ID NO: 1201 - RNA, 20 nt, Artificial Sequence
  Antisense oligonucleotide
  misc_feature (19)..(20): BNA scaffold modification
uucuuccaaagcagccuctc

SEQ ID NO: 1202 - RNA, 18 nt, Artificial Sequence
  Antisense oligonucleotide
cuuccaaagcagccucuc

SEQ ID NO: 1203 - RNA, 18 nt, Artificial Sequence
  Antisense oligonucleotide
  misc_feature (1)..(1): BNA scaffold modification
cuuccaaagcagccucuc

SEQ ID NO: 1204 - RNA, 18 nt, Artificial Sequence
  Antisense oligonucleotide
  misc_feature (18)..(18): BNA scaffold modification
cuuccaaagcagccucuc

SEQ ID NO: 1205 - RNA, 18 nt, Artificial Sequence
  Antisense oligonucleotide
  misc_feature (1)..(1): BNA scaffold modification
  misc_feature (18)..(18): BNA scaffold modification
cuuccaaagcagccucuc

SEQ ID NO: 1206 - RNA, 18 nt, Artificial Sequence
  Antisense oligonucleotide
  misc_feature (1)..(2): BNA scaffold modification
ctuccaaagcagccucuc

SEQ ID NO: 1207 - RNA, 18 nt, Artificial Sequence
  Antisense oligonucleotide
  misc_feature (17)..(18): BNA scaffold modification
cuuccaaagcagccuctc

SEQ ID NO: 1208 - RNA, 16 nt, Artificial Sequence
  Antisense oligonucleotide
uccaaagcagccucuc

SEQ ID NO: 1209 - RNA, 16 nt, Artificial Sequence
  Antisense oligonucleotide
  misc_feature (1)..(1): BNA scaffold modification
tccaaagcagccucuc

SEQ ID NO: 1210 - RNA, 16 nt, Artificial Sequence
  Antisense oligonucleotide
  misc_feature (16)..(16): BNA scaffold modification
uccaaagcagccucuc

SEQ ID NO: 1211 - RNA, 16 nt, Artificial Sequence
  Antisense oligonucleotide
  misc_feature (1)..(1): BNA scaffold modification
  misc_feature (16)..(16): BNA scaffold modification
tccaaagcagccucuc

SEQ ID NO: 1212 - RNA, 16 nt, Artificial Sequence
  Antisense oligonucleotide
  misc_feature (1)..(2): BNA scaffold modification
tccaaagcagccucuc

SEQ ID NO: 1213 - RNA, 16 nt, Artificial Sequence
  Antisense oligonucleotide
  misc_feature (15)..(16): BNA scaffold modification
uccaaagcagccuctc

SEQ ID NO: 1214 - RNA, 18 nt, Artificial Sequence
  Antisense oligonucleotide
uuucuuccaaagcagccu

SEQ ID NO: 1215 - RNA, 18 nt, Artificial Sequence
  Antisense oligonucleotide
  misc_feature (1)..(1): BNA scaffold modification
tuucuuccaaagcagccu

SEQ ID NO: 1216 - RNA, 18 nt, Artificial Sequence
  Antisense oligonucleotide
  misc_feature (18)..(18): BNA scaffold modification
uuucuuccaaagcagcct

SEQ ID NO: 1217 - RNA, 18 nt, Artificial Sequence
  Antisense oligonucleotide
  misc_feature (1)..(1): BNA scaffold modification
  misc_feature (18)..(18): BNA scaffold modification
tuucuuccaaagcagcct

SEQ ID NO: 1218 - RNA, 18 nt, Artificial Sequence
  Antisense oligonucleotide
  misc_feature (1)..(2): BNA scaffold modification
ttucuuccaaagcagccu

SEQ ID NO: 1219 - RNA, 18 nt, Artificial Sequence
  Antisense oligonucleotide
  misc_feature (17)..(18): BNA scaffold modification
uuucuuccaaagcagcct

SEQ ID NO: 1220 - RNA, 25 nt, Artificial Sequence
  Antisense oligonucleotide
uaugaguuucuuccaaagcagccuc

SEQ ID NO: 1221 - RNA, 25 nt, Artificial Sequence
  Antisense oligonucleotide
  misc_feature (1)..(1): BNA scaffold modification
taugaguuucuuccaaagcagccuc

SEQ ID NO: 1222 - RNA, 25 nt, Artificial Sequence
  Antisense oligonucleotide
  misc_feature (25)..(25): BNA scaffold modification
uaugaguuucuuccaaagcagccuc

SEQ ID NO: 1223 - RNA, 25 nt, Artificial Sequence
  Antisense oligonucleotide
  misc_feature (1)..(1): BNA scaffold modification
  misc_feature (25)..(25): BNA scaffold modification
taugaguuucuuccaaagcagccuc

SEQ ID NO: 1224 - RNA, 25 nt, Artificial Sequence
  Antisense oligonucleotide
  misc_feature (1)..(2): BNA scaffold modification
taugaguuucuuccaaagcagccuc

SEQ ID NO: 1225 - RNA, 25 nt, Artificial Sequence
  Antisense oligonucleotide
  misc_feature (24)..(25): BNA scaffold modification
uaugaguuucuuccaaagcagccuc

SEQ ID NO: 1226 - RNA, 22 nt, Artificial Sequence
  Antisense oligonucleotide
uaugaguuucuuccaaagcagc

SEQ ID NO: 1227 - RNA, 22 nt, Artificial Sequence
  Antisense oligonucleotide
  misc_feature (1)..(1): BNA scaffold modification
taugaguuucuuccaaagcagc

SEQ ID NO: 1228 - RNA, 22 nt, Artificial Sequence
  Antisense oligonucleotide
  misc_feature (22)..(22): BNA scaffold modification
uaugaguuucuuccaaagcagc

SEQ ID NO: 1229 - RNA, 22 nt, Artificial Sequence
  Antisense oligonucleotide
  misc_feature (1)..(1): BNA scaffold modification
  misc_feature (22)..(22): BNA scaffold modification
taugaguuucuuccaaagcagc

SEQ ID NO: 1230 - RNA, 22 nt, Artificial Sequence
  Antisense oligonucleotide
  misc_feature (1)..(2): BNA scaffold modification
taugaguuucuuccaaagcagc

SEQ ID NO: 1231 - RNA, 22 nt, Artificial Sequence
  Antisense oligonucleotide
  misc_feature (21)..(22): BNA scaffold modification
uaugaguuucuuccaaagcagc

SEQ ID NO: 1232 - RNA, 20 nt, Artificial Sequence
  Antisense oligonucleotide
uaugaguuucuuccaaagca

SEQ ID NO: 1233 - RNA, 20 nt, Artificial Sequence
  Antisense oligonucleotide
  misc_feature (1)..(1): BNA scaffold modification
taugaguuucuuccaaagca

SEQ ID NO: 1234 - RNA, 20 nt, Artificial Sequence
  Antisense oligonucleotide
  misc_feature (20)..(20): BNA scaffold modification
uaugaguuucuuccaaagca

SEQ ID NO: 1235 - RNA, 20 nt, Artificial Sequence
  Antisense oligonucleotide
  misc_feature (1)..(1): BNA scaffold modification
  misc_feature (20)..(20): BNA scaffold modification
taugaguuucuuccaaagca

SEQ ID NO: 1236 - RNA, 20 nt, Artificial Sequence
  Antisense oligonucleotide
  misc_feature (1)..(2): BNA scaffold modification
taugaguuucuuccaaagca

SEQ ID NO: 1237 - RNA, 20 nt, Artificial Sequence
  Antisense oligonucleotide
  misc_feature (19)..(20): BNA scaffold modification
uaugaguuucuuccaaagca

SEQ ID NO: 1238 - RNA, 18 nt, Artificial Sequence
  Antisense oligonucleotide
uaugaguuucuuccaaag

SEQ ID NO: 1239 - RNA, 18 nt, Artificial Sequence
  Antisense oligonucleotide
  misc_feature (1)..(1): BNA scaffold modification
taugaguuucuuccaaag

SEQ ID NO: 1240 - RNA, 18 nt, Artificial Sequence
  Antisense oligonucleotide
  misc_feature (18)..(18): BNA scaffold modification
uaugaguuucuuccaaag

SEQ ID NO: 1241 - RNA, 18 nt, Artificial Sequence
  Antisense oligonucleotide
  misc_feature (1)..(1): BNA scaffold modification
  misc_feature (18)..(18): BNA scaffold modification
taugaguuucuuccaaag

SEQ ID NO: 1242 - RNA, 18 nt, Artificial Sequence
  Antisense oligonucleotide
  misc_feature (1)..(2): BNA scaffold modification
taugaguuucuuccaaag

SEQ ID NO: 1243 - RNA, 18 nt, Artificial Sequence
  Antisense oligonucleotide
  misc_feature (17)..(18): BNA scaffold modification
uaugaguuucuuccaaag

SEQ ID NO: 1244 - RNA, 16 nt, Artificial Sequence
  Antisense oligonucleotide
uaugaguuucuuccaa

SEQ ID NO: 1245 - RNA, 16 nt, Artificial Sequence
  Antisense oligonucleotide
  misc_feature (1)..(1): BNA scaffold modification
taugaguuucuuccaa

SEQ ID NO: 1246 - RNA, 16 nt, Artificial Sequence
  Antisense oligonucleotide
  misc_feature (16)..(16): BNA scaffold modification
taugaguuucuuccaa

SEQ ID NO: 1247 - RNA, 16 nt, Artificial Sequence
  Antisense oligonucleotide
  misc_feature (1)..(1): BNA scaffold modification
  misc_feature (16)..(16): BNA scaffold modification
uaugaguuucuuccaa

SEQ ID NO: 1248 - RNA, 16 nt, Artificial Sequence
  Antisense oligonucleotide
  misc_feature (1)..(2): BNA scaffold modification
taugaguuucuuccaa

SEQ ID NO: 1249 - RNA, 16 nt, Artificial Sequence
  Antisense oligonucleotide
  misc_feature (15)..(16): BNA scaffold modification
uaugaguuucuuccaa

SEQ ID NO: 1250 - RNA, 22 nt, Artificial Sequence
  Antisense oligonucleotide
gaguuucuuccaaagcagccuc

SEQ ID NO: 1251 - RNA, 22 nt, Artificial Sequence
  Antisense oligonucleotide
  misc_feature (1)..(1): BNA scaffold modification
gaguuucuuccaaagcagccuc

SEQ ID NO: 1252 - RNA, 22 nt, Artificial Sequence
  Antisense oligonucleotide
  misc_feature (22)..(22): BNA scaffold modification
gaguuucuuccaaagcagccuc

SEQ ID NO: 1253 - RNA, 22 nt, Artificial Sequence
  Antisense oligonucleotide
  misc_feature (1)..(1): BNA scaffold modification
  misc_feature (22)..(22): BNA scaffold modification
gaguuucuuccaaagcagccuc

SEQ ID NO: 1254 - RNA, 22 nt, Artificial Sequence
  Antisense oligonucleotide
  misc_feature (1)..(2): BNA scaffold modification
gaguuucuuccaaagcagccuc

SEQ ID NO: 1255 - RNA, 22 nt, Artificial Sequence
  Antisense oligonucleotide
  misc_feature (21)..(22): BNA scaffold modification
gaguuucuuccaaagcagcctc

SEQ ID NO: 1256 - RNA, 20 nt, Artificial Sequence
  Antisense oligonucleotide
guuucuuccaaagcagccuc

SEQ ID NO: 1257 - RNA, 20 nt, Artificial Sequence
  Antisense oligonucleotide
  misc_feature (1)..(1): BNA scaffold modification
guuucuuccaaagcagccuc

SEQ ID NO: 1258 - RNA, 20 nt, Artificial Sequence
  Antisense oligonucleotide
  misc_feature (20)..(20): BNA scaffold modification
guuucuuccaaagcagccuc

SEQ ID NO: 1259 - RNA, 20 nt, Artificial Sequence
  Antisense oligonucleotide
  misc_feature (1)..(1): BNA scaffold modification
  misc_feature (20)..(20): BNA scaffold modification
guuucuuccaaagcagccuc

SEQ ID NO: 1260 - RNA, 20 nt, Artificial Sequence
  Antisense oligonucleotide
  misc_feature (1)..(2): BNA scaffold modification
gtuucuuccaaagcagccuc

SEQ ID NO: 1261 - RNA, 20 nt, Artificial Sequence
  Antisense oligonucleotide
  misc_feature (19)..(20): BNA scaffold modification
guuucuuccaaagcagcctc

SEQ ID NO: 1262 - RNA, 18 nt, Artificial Sequence
  Antisense oligonucleotide
uucuuccaaagcagccuc

SEQ ID NO: 1263 - RNA, 18 nt, Artificial Sequence
  Antisense oligonucleotide
  misc_feature (1)..(1): BNA scaffold modification
tucuuccaaagcagccuc

SEQ ID NO: 1264 - RNA, 18 nt, Artificial Sequence
  Antisense oligonucleotide
  misc_feature (18)..(18): BNA scaffold modification
uucuuccaaagcagccuc

SEQ ID NO: 1265 - RNA, 18 nt, Artificial Sequence
  Antisense oligonucleotide
  misc_feature (1)..(1): BNA scaffold modification
  misc_feature (18)..(18): BNA scaffold modification
tucuuccaaagcagccuc

SEQ ID NO: 1266 - RNA, 18 nt, Artificial Sequence
  Antisense oligonucleotide
  misc_feature (1)..(2): BNA scaffold modification
ttcuuccaaagcagccuc

SEQ ID NO: 1267 - RNA, 18 nt, Artificial Sequence
  Antisense oligonucleotide
  misc_feature (17)..(18): BNA scaffold modification
uucuuccaaagcagcctc

SEQ ID NO: 1268 - RNA, 16 nt, Artificial Sequence
  Antisense oligonucleotide
cuuccaaagcagccuc

SEQ ID NO: 1269 - RNA, 16 nt, Artificial Sequence
  Antisense oligonucleotide
  misc_feature (1)..(1): BNA scaffold modification
cuuccaaagcagccuc

SEQ ID NO: 1270 - RNA, 16 nt, Artificial Sequence
  Antisense oligonucleotide
  misc_feature (16)..(16): BNA scaffold modification
cuuccaaagcagccuc

SEQ ID NO: 1271 - RNA, 16 nt, Artificial Sequence
  Antisense oligonucleotide
  misc_feature (1)..(1): BNA scaffold modification
  misc_feature (16)..(16): BNA scaffold modification
cuuccaaagcagccuc

SEQ ID NO: 1272 - RNA, 16 nt, Artificial Sequence
  Antisense oligonucleotide
  misc_feature (1)..(2): BNA scaffold modification
ctuccaaagcagccuc

SEQ ID NO: 1273 - RNA, 16 nt, Artificial Sequence
  Antisense oligonucleotide
  misc_feature (15)..(16): BNA scaffold modification
cuuccaaagcagcctc

SEQ ID NO: 1274 - RNA, 18 nt, Artificial Sequence
  Antisense oligonucleotide
gaguuucuuccaaagcag

SEQ ID NO: 1275 - RNA, 18 nt, Artificial Sequence
  Antisense oligonucleotide
  misc_feature (1)..(1): BNA scaffold modification
gaguuucuuccaaagcag

SEQ ID NO: 1276 - RNA, 18 nt, Artificial Sequence
  Antisense oligonucleotide
  misc_feature (18)..(18): BNA scaffold modification
gaguuucuuccaaagcag

SEQ ID NO: 1277 - RNA, 18 nt, Artificial Sequence
  Antisense oligonucleotide
  misc_feature (1)..(1): BNA scaffold modification
  misc_feature (18)..(18): BNA scaffold modification
gaguuucuuccaaagcag

SEQ ID NO: 1278 - RNA, 18 nt, Artificial Sequence
  Antisense oligonucleotide
  misc_feature (1)..(2): BNA scaffold modification
gaguuucuuccaaagcag

SEQ ID NO: 1279 - RNA, 18 nt, Artificial Sequence
  Antisense oligonucleotide
  misc_feature (17)..(18): BNA scaffold modification
gaguuucuuccaaagcag

SEQ ID NO: 1280 - RNA, 24 nt, Artificial Sequence
  Antisense oligonucleotide
agcauccuguaggacauuggcagu

SEQ ID NO: 1281 - RNA, 24 nt, Artificial Sequence
  Antisense oligonucleotide
  misc_feature (1)..(1): BNA scaffold modification
agcauccuguaggacauuggcagu

SEQ ID NO: 1282 - RNA, 24 nt, Artificial Sequence
  Antisense oligonucleotide
  misc_feature (24)..(24): BNA scaffold modification
agcauccuguaggacauuggcagt

SEQ ID NO: 1283 - RNA, 24 nt, Artificial Sequence
  Antisense oligonucleotide
  misc_feature (1)..(1): BNA scaffold modification
  misc_feature (24)..(24): BNA scaffold modification
agcauccuguaggacauuggcagt

SEQ ID NO: 1284 - RNA, 24 nt, Artificial Sequence
  Antisense oligonucleotide
  misc_feature (1)..(2): BNA scaffold modification
agcauccuguaggacauuggcagu

SEQ ID NO: 1285 - RNA, 24 nt, Artificial Sequence
  Antisense oligonucleotide
  misc_feature (23)..(24): BNA scaffold modification
agcauccuguaggacauuggcagt

SEQ ID NO: 1286 - RNA, 22 nt, Artificial Sequence
  Antisense oligonucleotide
agcauccuguaggacauuggca

SEQ ID NO: 1287 - RNA, 22 nt, Artificial Sequence
  Antisense oligonucleotide
  misc_feature (1)..(1): BNA scaffold modification
agcauccuguaggacauuggca

SEQ ID NO: 1288 - RNA, 22 nt, Artificial Sequence
  Antisense oligonucleotide
  misc_feature (22)..(22): BNA scaffold modification
agcauccuguaggacauuggca

SEQ ID NO: 1289 - RNA, 22 nt, Artificial Sequence
  Antisense oligonucleotide
  misc_feature (1)..(1): BNA scaffold modification
  misc_feature (22)..(22): BNA scaffold modification
agcauccuguaggacauuggca

SEQ ID NO: 1290 - RNA, 22 nt, Artificial Sequence
  Antisense oligonucleotide
  misc_feature (1)..(2): BNA scaffold modification
agcauccuguaggacauuggca

SEQ ID NO: 1291 - RNA, 22 nt, Artificial Sequence
  Antisense oligonucleotide
  misc_feature (21)..(22): BNA scaffold modification
agcauccuguaggacauuggca

SEQ ID NO: 1292 - RNA, 20 nt, Artificial Sequence
  Antisense oligonucleotide
agcauccuguaggacauugg

SEQ ID NO: 1293 - RNA, 20 nt, Artificial Sequence
  Antisense oligonucleotide
  misc_feature (1)..(1): BNA scaffold modification
agcauccuguaggacauugg

SEQ ID NO: 1294 - RNA, 20 nt, Artificial Sequence
  Antisense oligonucleotide
  misc_feature (20)..(20): BNA scaffold modification
agcauccuguaggacauugg

SEQ ID NO: 1295 - RNA, 20 nt, Artificial Sequence
  Antisense oligonucleotide
  misc_feature (1)..(1): BNA scaffold modification
  misc_feature (20)..(20): BNA scaffold modification
agcauccuguaggacauugg

SEQ ID NO: 1296 - RNA, 20 nt, Artificial Sequence
  Antisense oligonucleotide
  misc_feature (1)..(2): BNA scaffold modification
agcauccuguaggacauugg

SEQ ID NO: 1297 - RNA, 20 nt, Artificial Sequence
  Antisense oligonucleotide
  misc_feature (19)..(20): BNA scaffold modification
agcauccuguaggacauugg

SEQ ID NO: 1298 - RNA, 18 nt, Artificial Sequence
  Antisense oligonucleotide
agcauccuguaggacauu

SEQ ID NO: 1299 - RNA, 18 nt, Artificial Sequence
  Antisense oligonucleotide
  misc_feature (1)..(1): BNA scaffold modification
agcauccuguaggacauu

SEQ ID NO: 1300 - RNA, 18 nt, Artificial Sequence
  Antisense oligonucleotide
  misc_feature (18)..(18): BNA scaffold modification
agcauccuguaggacaut

SEQ ID NO: 1301 - RNA, 18 nt, Artificial Sequence
  Antisense oligonucleotide
  misc_feature (1)..(1): BNA scaffold modification
  misc_feature (18)..(18): BNA scaffold modification
agcauccuguaggacaut

SEQ ID NO: 1302 - RNA, 18 nt, Artificial Sequence
  Antisense oligonucleotide
  misc_feature (1)..(2): BNA scaffold modification
agcauccuguaggacauu

SEQ ID NO: 1303 - RNA, 18 nt, Artificial Sequence
  Antisense oligonucleotide
  misc_feature (17)..(18): BNA scaffold modification
agcauccuguaggacatt

SEQ ID NO: 1304 - RNA, 16 nt, Artificial Sequence
  Antisense oligonucleotide
agcauccuguaggaca

SEQ ID NO: 1305 - RNA, 16 nt, Artificial Sequence
  Antisense oligonucleotide
  misc_feature (1)..(1): BNA scaffold modification
agcauccuguaggaca

SEQ ID NO: 1306 - RNA, 16 nt, Artificial Sequence
  Antisense oligonucleotide
  misc_feature (16)..(16): BNA scaffold modification
agcauccuguaggaca

SEQ ID NO: 1307 - RNA, 16 nt, Artificial Sequence
  Antisense oligonucleotide
  misc_feature (1)..(1): BNA scaffold modification
  misc_feature (16)..(16): BNA scaffold modification
agcauccuguaggaca

SEQ ID NO: 1308 - RNA, 16 nt, Artificial Sequence
  Antisense oligonucleotide
  misc_feature (1)..(2): BNA scaffold modification
agcauccuguaggaca

SEQ ID NO: 1309 - RNA, 16 nt, Artificial Sequence
  Antisense oligonucleotide
  misc_feature (15)..(16): BNA scaffold modification
agcauccuguaggaca

SEQ ID NO: 1310 - RNA, 22 nt, Artificial Sequence
  Antisense oligonucleotide
cauccuguaggacauuggcagu

SEQ ID NO: 1311 - RNA, 22 nt, Artificial Sequence
  Antisense oligonucleotide
  misc_feature (1)..(1): BNA scaffold modification
cauccuguaggacauuggcagu

SEQ ID NO: 1312 - RNA, 22 nt, Artificial Sequence
  Antisense oligonucleotide
  misc_feature (22)..(22): BNA scaffold modification
cauccuguaggacauuggcagt

SEQ ID NO: 1313 - RNA, 22 nt, Artificial Sequence
  Antisense oligonucleotide
  misc_feature (1)..(1): BNA scaffold modification
  misc_feature (22)..(22): BNA scaffold modification
cauccuguaggacauuggcagt

SEQ ID NO: 1314 - RNA, 22 nt, Artificial Sequence
  Antisense oligonucleotide
  misc_feature (1)..(2): BNA scaffold modification
cauccuguaggacauuggcagu

SEQ ID NO: 1315 - RNA, 22 nt, Artificial Sequence
  Antisense oligonucleotide
  misc_feature (21)..(22): BNA scaffold modification
cauccuguaggacauuggcagt

SEQ ID NO: 1316 - RNA, 20 nt, Artificial Sequence
  Antisense oligonucleotide
uccuguaggacauuggcagu

SEQ ID NO: 1317 - RNA, 20 nt, Artificial Sequence
  Antisense oligonucleotide
  misc_feature (1)..(1): BNA scaffold modification
tccuguaggacauuggcagu

SEQ ID NO: 1318 - RNA, 20 nt, Artificial Sequence
  Antisense oligonucleotide
  misc_feature (20)..(20): BNA scaffold modification
uccuguaggacauuggcagt

SEQ ID NO: 1319 - RNA, 20 nt, Artificial Sequence
  Antisense oligonucleotide
  misc_feature (1)..(1): BNA scaffold modification
  misc_feature (20)..(20): BNA scaffold modification
tccuguaggacauuggcagt

SEQ ID NO: 1320 - RNA, 20 nt, Artificial Sequence
  Antisense oligonucleotide
  misc_feature (1)..(2): BNA scaffold modification
tccuguaggacauuggcagu

SEQ ID NO: 1321 - RNA, 20 nt, Artificial Sequence
  Antisense oligonucleotide
  misc_feature (19)..(20): BNA scaffold modification
uccuguaggacauuggcagt

SEQ ID NO: 1322 - RNA, 18 nt, Artificial Sequence
  Antisense oligonucleotide
cuguaggacauuggcagu

SEQ ID NO: 1323 - RNA, 18 nt, Artificial Sequence
  Antisense oligonucleotide
  misc_feature (1)..(1): BNA scaffold modification
cuguaggacauuggcagu

SEQ ID NO: 1324 - RNA, 18 nt, Artificial Sequence
  Antisense oligonucleotide
  misc_feature (18)..(18): BNA scaffold modification
cuguaggacauuggcagt

SEQ ID NO: 1325 - RNA, 18 nt, Artificial Sequence
  Antisense oligonucleotide
  misc_feature (1)..(1): BNA scaffold modification
  misc_feature (18)..(18): BNA scaffold modification
cuguaggacauuggcagt

SEQ ID NO: 1326 - RNA, 18 nt, Artificial Sequence
  Antisense oligonucleotide
  misc_feature (1)..(2): BNA scaffold modification
ctguaggacauuggcagu

SEQ ID NO: 1327 - RNA, 18 nt, Artificial Sequence
  Antisense oligonucleotide
  misc_feature (17)..(18): BNA scaffold modification
cuguaggacauuggcagt

SEQ ID NO: 1328 - RNA, 16 nt, Artificial Sequence
  Antisense oligonucleotide
guaggacauuggcagu

SEQ ID NO: 1329 - RNA, 16 nt, Artificial Sequence
  Antisense oligonucleotide
  misc_feature (1)..(1): BNA scaffold modification
guaggacauuggcagu

SEQ ID NO: 1330 - RNA, 16 nt, Artificial Sequence
  Antisense oligonucleotide
  misc_feature (16)..(16): BNA scaffold modification
guaggacauuggcagt

SEQ ID NO: 1331 - RNA, 16 nt, Artificial Sequence
  Antisense oligonucleotide
  misc_feature (1)..(1): BNA scaffold modification
  misc_feature (16)..(16): BNA scaffold modification
guaggacauuggcagt

SEQ ID NO: 1332 - RNA, 16 nt, Artificial Sequence
  Antisense oligonucleotide
  misc_feature (1)..(2): BNA scaffold modification
gtaggacauuggcagu

SEQ ID NO: 1333 - RNA, 16 nt, Artificial Sequence
  Antisense oligonucleotide
  misc_feature (15)..(16): BNA scaffold modification
guaggacauuggcagt

SEQ ID NO: 1334 - RNA, 18 nt, Artificial Sequence
  Antisense oligonucleotide
auccuguaggacauuggc

SEQ ID NO: 1335 - RNA, 18 nt, Artificial Sequence
  Antisense oligonucleotide
  misc_feature (1)..(1): BNA scaffold modification
auccuguaggacauuggc

SEQ ID NO: 1336 - RNA, 18 nt, Artificial Sequence
  Antisense oligonucleotide
  misc_feature (18)..(18): BNA scaffold modification
auccuguaggacauuggc

SEQ ID NO: 1337 - RNA, 18 nt, Artificial Sequence
  Antisense oligonucleotide
  misc_feature (1)..(1): BNA scaffold modification
  misc_feature (18)..(18): BNA scaffold modification
auccuguaggacauuggc

SEQ ID NO: 1338 - RNA, 18 nt, Artificial Sequence
  Antisense oligonucleotide
  misc_feature (1)..(2): BNA scaffold modification
atccuguaggacauuggc

SEQ ID NO: 1339 - RNA, 18 nt, Artificial Sequence
  Antisense oligonucleotide
  misc_feature (17)..(18): BNA scaffold modification
auccuguaggacauuggc

SEQ ID NO: 1340 - RNA, 24 nt, Artificial Sequence
  Antisense oligonucleotide
cuguaggacauuggcaguuguuuc

SEQ ID NO: 1341 - RNA, 24 nt, Artificial Sequence
  Antisense oligonucleotide
  misc_feature (1)..(1): BNA scaffold modification
cuguaggacauuggcaguuguuuc

SEQ ID NO: 1342 - RNA, 24 nt, Artificial Sequence
  Antisense oligonucleotide
  misc_feature (24)..(24): BNA scaffold modification
cuguaggacauuggcaguuguuuc

SEQ ID NO: 1343 - RNA, 24 nt, Artificial Sequence
  Antisense oligonucleotide
  misc_feature (1)..(1): BNA scaffold modification
  misc_feature (24)..(24): BNA scaffold modification
cuguaggacauuggcaguuguuuc

SEQ ID NO: 1344 - RNA, 24 nt, Artificial Sequence
  Antisense oligonucleotide
  misc_feature (1)..(2): BNA scaffold modification
ctguaggacauuggcaguuguuuc

SEQ ID NO: 1345 - RNA, 24 nt, Artificial Sequence
  Antisense oligonucleotide
  misc_feature (23)..(24): BNA scaffold modification
cuguaggacauuggcaguuguutc

SEQ ID NO: 1346 - RNA, 22 nt, Artificial Sequence
  Antisense oligonucleotide
cuguaggacauuggcaguuguu

SEQ ID NO: 1347 - RNA, 22 nt, Artificial Sequence
  Antisense oligonucleotide
  misc_feature (1)..(1): BNA scaffold modification
cuguaggacauuggcaguuguu

SEQ ID NO: 1348 - RNA, 22 nt, Artificial Sequence
  Antisense oligonucleotide
  misc_feature (22)..(22): BNA scaffold modification
cuguaggacauuggcaguugut

SEQ ID NO: 1349 - RNA, 22 nt, Artificial Sequence
  Antisense oligonucleotide
  misc_feature (1)..(1): BNA scaffold modification
  misc_feature (22)..(22): BNA scaffold modification
cuguaggacauuggcaguugut

SEQ ID NO: 1350 - RNA, 22 nt, Artificial Sequence
  Antisense oligonucleotide
  misc_feature (1)..(2): BNA scaffold modification
ctguaggacauuggcaguuguu

SEQ ID NO: 1351 - RNA, 22 nt, Artificial Sequence
  Antisense oligonucleotide
  misc_feature (21)..(22): BNA scaffold modification
cuguaggacauuggcaguugtt

SEQ ID NO: 1352 - RNA, 20 nt, Artificial Sequence
  Antisense oligonucleotide
cuguaggacauuggcaguug

SEQ ID NO: 1353 - RNA, 20 nt, Artificial Sequence
  Antisense oligonucleotide
  misc_feature (1)..(1): BNA scaffold modification
cuguaggacauuggcaguug

SEQ ID NO: 1354 - RNA, 20 nt, Artificial Sequence
  Antisense oligonucleotide
  misc_feature (20)..(20): BNA scaffold modification
cuguaggacauuggcaguug

SEQ ID NO: 1355 - RNA, 20 nt, Artificial Sequence
  Antisense oligonucleotide
  misc_feature (1)..(1): BNA scaffold modification
  misc_feature (20)..(20): BNA scaffold modification
cuguaggacauuggcaguug

SEQ ID NO: 1356 - RNA, 20 nt, Artificial Sequence
  Antisense oligonucleotide
  misc_feature (1)..(2): BNA scaffold modification
ctguaggacauuggcaguug

SEQ ID NO: 1357 - RNA, 20 nt, Artificial Sequence
  Antisense oligonucleotide
  misc_feature (19)..(20): BNA scaffold modification
cuguaggacauuggcagutg

SEQ ID NO: 1358 - RNA, 18 nt, Artificial Sequence
  Antisense oligonucleotide
cuguaggacauuggcagu

SEQ ID NO: 1359 - RNA, 18 nt, Artificial Sequence
  Antisense oligonucleotide
  misc_feature (1)..(1): BNA scaffold modification
cuguaggacauuggcagu

SEQ ID NO: 1360 - RNA, 18 nt, Artificial Sequence
  Antisense oligonucleotide
  misc_feature (18)..(18): BNA scaffold modification
cuguaggacauuggcagt

SEQ ID NO: 1361 - RNA, 18 nt, Artificial Sequence
  Antisense oligonucleotide
  misc_feature (1)..(1): BNA scaffold modification
  misc_feature (18)..(18): BNA scaffold modification
cuguaggacauuggcagt

SEQ ID NO: 1362 - RNA, 18 nt, Artificial Sequence
  Antisense oligonucleotide
  misc_feature (1)..(2): BNA scaffold modification
ctguaggacauuggcagu

SEQ ID NO: 1363 - RNA, 18 nt, Artificial Sequence
  Antisense oligonucleotide
  misc_feature (17)..(18): BNA scaffold modification
cuguaggacauuggcagt

SEQ ID NO: 1364 - RNA, 16 nt, Artificial Sequence
  Antisense oligonucleotide
cuguaggacauuggca

SEQ ID NO: 1365 - RNA, 16 nt, Artificial Sequence
  Antisense oligonucleotide
  misc_feature (1)..(1): BNA scaffold modification
cuguaggacauuggca

SEQ ID NO: 1366 - RNA, 16 nt, Artificial Sequence
  Antisense oligonucleotide
  misc_feature (16)..(16): BNA scaffold modification
cuguaggacauuggca

SEQ ID NO: 1367 - RNA, 16 nt, Artificial Sequence
  Antisense oligonucleotide
  misc_feature (1)..(1): BNA scaffold modification
  misc_feature (16)..(16): BNA scaffold modification
cuguaggacauuggca

SEQ ID NO: 1368 - RNA, 16 nt, Artificial Sequence
  Antisense oligonucleotide
  misc_feature (1)..(2): BNA scaffold modification
ctguaggacauuggca

SEQ ID NO: 1369 - RNA, 16 nt, Artificial Sequence
  Antisense oligonucleotide
  misc_feature (15)..(16): BNA scaffold modification
cuguaggacauuggca

SEQ ID NO: 1370 - RNA, 22 nt, Artificial Sequence
  Antisense oligonucleotide
guaggacauuggcaguuguuuc

SEQ ID NO: 1371 - RNA, 22 nt, Artificial Sequence
  Antisense oligonucleotide
  misc_feature (1)..(1): BNA scaffold modification
guaggacauuggcaguuguuuc

SEQ ID NO: 1372 - RNA, 22 nt, Artificial Sequence
  Antisense oligonucleotide
  misc_feature (22)..(22): BNA scaffold modification
guaggacauuggcaguuguuuc

SEQ ID NO: 1373 - RNA, 22 nt, Artificial Sequence
  Antisense oligonucleotide
  misc_feature (1)..(1): BNA scaffold modification
  misc_feature (22)..(22): BNA scaffold modification
guaggacauuggcaguuguuuc

SEQ ID NO: 1374 - RNA, 22 nt, Artificial Sequence
  Antisense oligonucleotide
  misc_feature (1)..(2): BNA scaffold modification
gtaggacauuggcaguuguuuc

SEQ ID NO: 1375 - RNA, 22 nt, Artificial Sequence
  Antisense oligonucleotide
  misc_feature (21)..(22): BNA scaffold modification
guaggacauuggcaguuguutc

SEQ ID NO: 1376 - RNA, 20 nt, Artificial Sequence
  Antisense oligonucleotide
aggacauuggcaguuguuuc

SEQ ID NO: 1377 - RNA, 20 nt, Artificial Sequence
  Antisense oligonucleotide
  misc_feature (1)..(1): BNA scaffold modification
aggacauuggcaguuguuuc

SEQ ID NO: 1378 - RNA, 20 nt, Artificial Sequence
  Antisense oligonucleotide
  misc_feature (20)..(20): BNA scaffold modification
aggacauuggcaguuguuuc

SEQ ID NO: 1379 - RNA, 20 nt, Artificial Sequence
  Antisense oligonucleotide
  misc_feature (1)..(1): BNA scaffold modification
  misc_feature (20)..(20): BNA scaffold modification
aggacauuggcaguuguuuc

SEQ ID NO: 1380 - RNA, 20 nt, Artificial Sequence
  Antisense oligonucleotide
  misc_feature (1)..(2): BNA scaffold modification
aggacauuggcaguuguuuc

SEQ ID NO: 1381 - RNA, 20 nt, Artificial Sequence
  Antisense oligonucleotide
  misc_feature (19)..(20): BNA scaffold modification
aggacauuggcaguuguutc

SEQ ID NO: 1382 - RNA, 18 nt, Artificial Sequence
  Antisense oligonucleotide
gacauuggcaguuguuuc

SEQ ID NO: 1383 - RNA, 18 nt, Artificial Sequence
  Antisense oligonucleotide
  misc_feature (1)..(1): BNA scaffold modification
gacauuggcaguuguuuc

SEQ ID NO: 1384 - RNA, 18 nt, Artificial Sequence
  Antisense oligonucleotide
  misc_feature (18)..(18): BNA scaffold modification
gacauuggcaguuguuuc

SEQ ID NO: 1385 - RNA, 18 nt, Artificial Sequence
  Antisense oligonucleotide
  misc_feature (1)..(1): BNA scaffold modification
  misc_feature (18)..(18): BNA scaffold modification
gacauuggcaguuguuuc

SEQ ID NO: 1386 - RNA, 18 nt, Artificial Sequence
  Antisense oligonucleotide
  misc_feature (1)..(2): BNA scaffold modification
gacauuggcaguuguuuc

SEQ ID NO: 1387 - RNA, 18 nt, Artificial Sequence
  Antisense oligonucleotide
  misc_feature (17)..(18): BNA scaffold modification
gacauuggcaguuguutc

SEQ ID NO: 1388 - RNA, 16 nt, Artificial Sequence
  Antisense oligonucleotide
cauuggcaguuguuuc

SEQ ID NO: 1389 - RNA, 16 nt, Artificial Sequence
  Antisense oligonucleotide
  misc_feature (1)..(1): BNA scaffold modification
cauuggcaguuguuuc

SEQ ID NO: 1390 - RNA, 16 nt, Artificial Sequence
  Antisense oligonucleotide
  misc_feature (16)..(16): BNA scaffold modification
cauuggcaguuguuuc

SEQ ID NO: 1391 - RNA, 16 nt, Artificial Sequence
  Antisense oligonucleotide
  misc_feature (1)..(1): BNA scaffold modification
  misc_feature (16)..(16): BNA scaffold modification
cauuggcaguuguuuc

SEQ ID NO: 1392 - RNA, 16 nt, Artificial Sequence
  Antisense oligonucleotide
  misc_feature (1)..(2): BNA scaffold modification
cauuggcaguuguuuc

SEQ ID NO: 1393 - RNA, 16 nt, Artificial Sequence
  Antisense oligonucleotide
  misc_feature (15)..(16): BNA scaffold modification
cauuggcaguuguutc

SEQ ID NO: 1394 - RNA, 18 nt, Artificial Sequence
  Antisense oligonucleotide
uaggacauuggcaguugu

SEQ ID NO: 1395 - RNA, 18 nt, Artificial Sequence
  Antisense oligonucleotide
  misc_feature (1)..(1): BNA scaffold modification
taggacauuggcaguugu

SEQ ID NO: 1396 - RNA, 18 nt, Artificial Sequence
  Antisense oligonucleotide
  misc_feature (18)..(18): BNA scaffold modification
uaggacauuggcaguugt

SEQ ID NO: 1397 - RNA, 18 nt, Artificial Sequence
  Antisense oligonucleotide
  misc_feature (1)..(1): BNA scaffold modification
  misc_feature (18)..(18): BNA scaffold modification
taggacauuggcaguugt

SEQ ID NO: 1398 - RNA, 18 nt, Artificial Sequence
  Antisense oligonucleotide
  misc_feature (1)..(2): BNA scaffold modification
taggacauuggcaguugu

SEQ ID NO: 1399 - RNA, 18 nt, Artificial Sequence
  Antisense oligonucleotide
  misc_feature (17)..(18): BNA scaffold modification
uaggacauuggcaguugt

SEQ ID NO: 1400 - RNA, 15 nt, Artificial Sequence
  Antisense oligonucleotide
cuguaaggaaaauaa

SEQ ID NO: 1401 - RNA, 15 nt, Artificial Sequence
  Antisense oligonucleotide
  misc_feature (1)..(1): BNA scaffold modification
cuguaaggaaaauaa

SEQ ID NO: 1402 - RNA, 15 nt, Artificial Sequence
  Antisense oligonucleotide
  misc_feature (15)..(15): BNA scaffold modification
cuguaaggaaaauaa

SEQ ID NO: 1403 - RNA, 15 nt, Artificial Sequence
  Antisense oligonucleotide
  misc_feature (1)..(1): BNA scaffold modification
  misc_feature (15)..(15): BNA scaffold modification
cuguaaggaaaauaa

SEQ ID NO: 1404 - RNA, 15 nt, Artificial Sequence
  Antisense oligonucleotide
  misc_feature (1)..(2): BNA scaffold modification
ctguaaggaaaauaa

SEQ ID NO: 1405 - RNA, 15 nt, Artificial Sequence
  Antisense oligonucleotide
  misc_feature (14)..(15): BNA scaffold modification
cuguaaggaaaauaa

SEQ ID NO: 1406 - RNA, 15 nt, Artificial Sequence
  Antisense oligonucleotide
aggaaaauaaaggaa

SEQ ID NO: 1407 - RNA, 15 nt, Artificial Sequence
  Antisense oligonucleotide
  misc_feature (1)..(1): BNA scaffold modification
aggaaaauaaaggaa

SEQ ID NO: 1408 - RNA, 15 nt, Artificial Sequence
  Antisense oligonucleotide
  misc_feature (15)..(15): BNA scaffold modification
aggaaaauaaaggaa

SEQ ID NO: 1409 - RNA, 15 nt, Artificial Sequence
  Antisense oligonucleotide
  misc_feature (1)..(1): BNA scaffold modification
  misc_feature (15)..(15): BNA scaffold modification
aggaaaauaaaggaa

SEQ ID NO: 1410 - RNA, 15 nt, Artificial Sequence
  Antisense oligonucleotide
  misc_feature (1)..(2): BNA scaffold modification
aggaaaauaaaggaa

SEQ ID NO: 1411 - RNA, 15 nt, Artificial Sequence
  Antisense oligonucleotide
  misc_feature (14)..(15): BNA scaffold modification
aggaaaauaaaggaa

SEQ ID NO: 1412 - RNA, 15 nt, Artificial Sequence
  Antisense oligonucleotide
aauaaaggaaguuaa

SEQ ID NO: 1413 - RNA, 15 nt, Artificial Sequence
  Antisense oligonucleotide
  misc_feature (1)..(1): BNA scaffold modification
aauaaaggaaguuaa

SEQ ID NO: 1414 - RNA, 15 nt, Artificial Sequence
  Antisense oligonucleotide
  misc_feature (15)..(15): BNA scaffold modification
aauaaaggaaguuaa

SEQ ID NO: 1415 - RNA, 15 nt, Artificial Sequence
  Antisense oligonucleotide
  misc_feature (1)..(1): BNA scaffold modification
  misc_feature (15)..(15): BNA scaffold modification
aauaaaggaaguuaa

SEQ ID NO: 1416 - RNA, 15 nt, Artificial Sequence
  Antisense oligonucleotide
  misc_feature (1)..(2): BNA scaffold modification
aauaaaggaaguuaa

SEQ ID NO: 1417 - RNA, 15 nt, Artificial Sequence
  Antisense oligonucleotide
  misc_feature (14)..(15): BNA scaffold modification
aauaaaggaaguuaa

SEQ ID NO: 1418 - RNA, 15 nt, Artificial Sequence
  Antisense oligonucleotide
auagcuauauagaua

SEQ ID NO: 1419 - RNA, 15 nt, Artificial Sequence
  Antisense oligonucleotide
  misc_feature (1)..(1): BNA scaffold modification
auagcuauauagaua

SEQ ID NO: 1420 - RNA, 15 nt, Artificial Sequence
  Antisense oligonucleotide
  misc_feature (15)..(15): BNA scaffold modification
auagcuauauagaua

SEQ ID NO: 1421 - RNA, 15 nt, Artificial Sequence
  Antisense oligonucleotide
  misc_feature (1)..(1): BNA scaffold modification
  misc_feature (15)..(15): BNA scaffold modification
auagcuauauagaua

SEQ ID NO: 1422 - RNA, 15 nt, Artificial Sequence
  Antisense oligonucleotide
  misc_feature (1)..(2): BNA scaffold modification
atagcuauauagaua

SEQ ID NO: 1423 - RNA, 15 nt, Artificial Sequence
  Antisense oligonucleotide
  misc_feature (14)..(15): BNA scaffold modification
auagcuauauagata

SEQ ID NO: 1424 - RNA, 15 nt, Artificial Sequence
  Antisense oligonucleotide
uauauagauauagau

SEQ ID NO: 1425 - RNA, 15 nt, Artificial Sequence
  Antisense oligonucleotide
  misc_feature (1)..(1): BNA scaffold modification
tauauagauauagau

SEQ ID NO: 1426 - RNA, 15 nt, Artificial Sequence
  Antisense oligonucleotide
  misc_feature (15)..(15): BNA scaffold modification
uauauagauauagat

SEQ ID NO: 1427 - RNA, 15 nt, Artificial Sequence
  Antisense oligonucleotide
  misc_feature (1)..(1): BNA scaffold modification
  misc_feature (15)..(15): BNA scaffold modification
tauauagauauagat

SEQ ID NO: 1428 - RNA, 15 nt, Artificial Sequence
  Antisense oligonucleotide
  misc_feature (1)..(2): BNA scaffold modification
tauauagauauagau

SEQ ID NO: 1429 - RNA, 15 nt, Artificial Sequence
  Antisense oligonucleotide
  misc_feature (14)..(15): BNA scaffold modification
uauauagauauagat

SEQ ID NO: 1430 - RNA, 15 nt, Artificial Sequence
  Antisense oligonucleotide
agauauagauagcua

SEQ ID NO: 1431 - RNA, 15 nt, Artificial Sequence
  Antisense oligonucleotide
  misc_feature (1)..(1): BNA scaffold modification
agauauagauagcua

SEQ ID NO: 1432 - RNA, 15 nt, Artificial Sequence
  Antisense oligonucleotide
  misc_feature (15)..(15): BNA scaffold modification
agauauagauagcua

SEQ ID NO: 1433 - RNA, 15 nt, Artificial Sequence
  Antisense oligonucleotide
  misc_feature (1)..(1): BNA scaffold modification
  misc_feature (15)..(15): BNA scaffold modification
agauauagauagcua

SEQ ID NO: 1434 - RNA, 15 nt, Artificial Sequence
  Antisense oligonucleotide
  misc_feature (1)..(2): BNA scaffold modification
agauauagauagcua

SEQ ID NO: 1435 - RNA, 15 nt, Artificial Sequence
  Antisense oligonucleotide
  misc_feature (14)..(15): BNA scaffold modification
agauauagauagcta

SEQ ID NO: 1436 - RNA, 15 nt, Artificial Sequence
  Antisense oligonucleotide
uagauagcuauauau

SEQ ID NO: 1437 - RNA, 15 nt, Artificial Sequence
  Antisense oligonucleotide
  misc_feature (1)..(1): BNA scaffold modification
tagauagcuauauau

SEQ ID NO: 1438 - RNA, 15 nt, Artificial Sequence
  Antisense oligonucleotide
  misc_feature (15)..(15): BNA scaffold modification
uagauagcuauauat

SEQ ID NO: 1439 - RNA, 15 nt, Artificial Sequence
  Antisense oligonucleotide
  misc_feature (1)..(1): BNA scaffold modification
  misc_feature (15)..(15): BNA scaffold modification
tagauagcuauauat

SEQ ID NO: 1440 - RNA, 15 nt, Artificial Sequence
  Antisense oligonucleotide
  misc_feature (1)..(2): BNA scaffold modification
tagauagcuauauau

SEQ ID NO: 1441 - RNA, 15 nt, Artificial Sequence
  Antisense oligonucleotide
  misc_feature (14)..(15): BNA scaffold modification
uagauagcuauauat

SEQ ID NO: 1442 - RNA, 15 nt, Artificial Sequence
  Antisense oligonucleotide
ugcuggcagacuuac

SEQ ID NO: 1443 - RNA, 15 nt, Artificial Sequence
  Antisense oligonucleotide
  misc_feature (1)..(1): BNA scaffold modification
tgcuggcagacuuac

SEQ ID NO: 1444 - RNA, 15 nt, Artificial Sequence
  Antisense oligonucleotide
  misc_feature (15)..(15): BNA scaffold modification
ugcuggcagacuuac

SEQ ID NO: 1445 - RNA, 15 nt, Artificial Sequence
  Antisense oligonucleotide
  misc_feature (1)..(1): BNA scaffold modification
  misc_feature (15)..(15): BNA scaffold modification
tgcuggcagacuuac

SEQ ID NO: 1446 - RNA, 15 nt, Artificial Sequence
  Antisense oligonucleotide
  misc_feature (1)..(2): BNA scaffold modification
tgcuggcagacuuac

SEQ ID NO: 1447 - RNA, 15 nt, Artificial Sequence
  Antisense oligonucleotide
  misc_feature (14)..(15): BNA scaffold modification
ugcuggcagacuuac

SEQ ID NO: 1448 - RNA, 15 nt, Artificial Sequence
  Antisense oligonucleotide
cauaaugcuggcaga

SEQ ID NO: 1449 - RNA, 15 nt, Artificial Sequence
  Antisense oligonucleotide
  misc_feature (1)..(1): BNA scaffold modification
cauaaugcuggcaga

SEQ ID NO: 1450 - RNA, 15 nt, Artificial Sequence
  Antisense oligonucleotide
  misc_feature (15)..(15): BNA scaffold modification
cauaaugcuggcaga

SEQ ID NO: 1451 - RNA, 15 nt, Artificial Sequence
  Antisense oligonucleotide
  misc_feature (1)..(1): BNA scaffold modification
  misc_feature (15)..(15): BNA scaffold modification
cauaaugcuggcaga

SEQ ID NO: 1452 - RNA, 15 nt, Artificial Sequence
  Antisense oligonucleotide
  misc_feature (1)..(2): BNA scaffold modification
cauaaugcuggcaga

SEQ ID NO: 1453 - RNA, 15 nt, Artificial Sequence
  Antisense oligonucleotide
  misc_feature (14)..(15): BNA scaffold modification
cauaaugcuggcaga

SEQ ID NO: 1454 - RNA, 15 nt, Artificial Sequence
  Antisense oligonucleotide
ucauaaugcuggcag

SEQ ID NO: 1455 - RNA, 15 nt, Artificial Sequence
  Antisense oligonucleotide
  misc_feature (1)..(1): BNA scaffold modification
tcauaaugcuggcag

SEQ ID NO: 1456 - RNA, 15 nt, Artificial Sequence
  Antisense oligonucleotide
  misc_feature (15)..(15): BNA scaffold modification
ucauaaugcuggcag

SEQ ID NO: 1457 - RNA, 15 nt, Artificial Sequence
  Antisense oligonucleotide
  misc_feature (1)..(1): BNA scaffold modification
  misc_feature (15)..(15): BNA scaffold modification
tcauaaugcuggcag

SEQ ID NO: 1458 - RNA, 15 nt, Artificial Sequence
  Antisense oligonucleotide
  misc_feature (1)..(2): BNA scaffold modification
tcauaaugcuggcag

SEQ ID NO: 1459 - RNA, 15 nt, Artificial Sequence
  Antisense oligonucleotide
  misc_feature (14)..(15): BNA scaffold modification
ucauaaugcuggcag

SEQ ID NO: 1460 - RNA, 15 nt, Artificial Sequence
  Antisense oligonucleotide
uucauaaugcuggca

SEQ ID NO: 1461 - RNA, 15 nt, Artificial Sequence
  Antisense oligonucleotide
  misc_feature (1)..(1): BNA scaffold modification
tucauaaugcuggca

SEQ ID NO: 1462 - RNA, 15 nt, Artificial Sequence
  Antisense oligonucleotide
  misc_feature (15)..(15): BNA scaffold modification
uucauaaugcuggca

SEQ ID NO: 1463 - RNA, 15 nt, Artificial Sequence
  Antisense oligonucleotide
  misc_feature (1)..(1): BNA scaffold modification
  misc_feature (15)..(15): BNA scaffold modification
tucauaaugcuggca

SEQ ID NO: 1464 - RNA, 15 nt, Artificial Sequence
  Antisense oligonucleotide
  misc_feature (1)..(2): BNA scaffold modification
ttcauaaugcuggca

SEQ ID NO: 1465 - RNA, 15 nt, Artificial Sequence
  Antisense oligonucleotide
  misc_feature (14)..(15): BNA scaffold modification
uucauaaugcuggca

SEQ ID NO: 1466 - RNA, 18 nt, Artificial Sequence
  Antisense oligonucleotide
acuuucauaaugcuggca

SEQ ID NO: 1467 - RNA, 18 nt, Artificial Sequence
  Antisense oligonucleotide
  misc_feature (1)..(1): BNA scaffold modification
acuuucauaaugcuggca

SEQ ID NO: 1468 - RNA, 18 nt, Artificial Sequence
  Antisense oligonucleotide
  misc_feature (18)..(18): BNA scaffold modification
acuuucauaaugcuggca

SEQ ID NO: 1469 - RNA, 18 nt, Artificial Sequence
  Antisense oligonucleotide
  misc_feature (1)..(1): BNA scaffold modification
  misc_feature (18)..(18): BNA scaffold modification
acuuucauaaugcuggca

SEQ ID NO: 1470 - RNA, 18 nt, Artificial Sequence
  Antisense oligonucleotide
  misc_feature (1)..(2): BNA scaffold modification
acuuucauaaugcuggca

SEQ ID NO: 1471 - RNA, 18 nt, Artificial Sequence
  Antisense oligonucleotide
  misc_feature (17)..(18): BNA scaffold modification
acuuucauaaugcuggca

SEQ ID NO: 1472 - RNA, 15 nt, Artificial Sequence
  Antisense oligonucleotide
uuucauaaugcuggc

SEQ ID NO: 1473 - RNA, 15 nt, Artificial Sequence
  Antisense oligonucleotide
  misc_feature (1)..(1): BNA scaffold modification
tuucauaaugcuggc

SEQ ID NO: 1474 - RNA, 15 nt, Artificial Sequence
  Antisense oligonucleotide
  misc_feature (15)..(15): BNA scaffold modification
uuucauaaugcuggc

SEQ ID NO: 1475 - RNA, 15 nt, Artificial Sequence
  Antisense oligonucleotide
  misc_feature (1)..(1): BNA scaffold modification
  misc_feature (15)..(15): BNA scaffold modification
tuucauaaugcuggc

SEQ ID NO: 1476 - RNA, 15 nt, Artificial Sequence
  Antisense oligonucleotide
  misc_feature (1)..(2): BNA scaffold modification
ttucauaaugcuggc

SEQ ID NO: 1477 - RNA, 15 nt, Artificial Sequence
  Antisense oligonucleotide
  misc_feature (14)..(15): BNA scaffold modification
uuucauaaugcuggc

SEQ ID NO: 1478 - RNA, 18 nt, Artificial Sequence
  Antisense oligonucleotide
cacuuucauaaugcuggc

SEQ ID NO: 1479 - RNA, 18 nt, Artificial Sequence
  Antisense oligonucleotide
  misc_feature (1)..(1): BNA scaffold modification
cacuuucauaaugcuggc

SEQ ID NO: 1480 - RNA, 18 nt, Artificial Sequence
  Antisense oligonucleotide
  misc_feature (18)..(18): BNA scaffold modification
cacuuucauaaugcuggc

SEQ ID NO: 1481 - RNA, 18 nt, Artificial Sequence
  Antisense oligonucleotide
  misc_feature (1)..(1): BNA scaffold modification
  misc_feature (18)..(18): BNA scaffold modification
cacuuucauaaugcuggc

SEQ ID NO: 1482 - RNA, 18 nt, Artificial Sequence
  Antisense oligonucleotide
  misc_feature (1)..(2): BNA scaffold modification
cacuuucauaaugcuggc

SEQ ID NO: 1483 - RNA, 18 nt, Artificial Sequence
  Antisense oligonucleotide
  misc_feature (17)..(18): BNA scaffold modification
cacuuucauaaugcuggc

SEQ ID NO: 1484 - RNA, 15 nt, Artificial Sequence
  Antisense oligonucleotide
cuuucauaaugcugg

SEQ ID NO: 1485 - RNA, 15 nt, Artificial Sequence
  Antisense oligonucleotide
  misc_feature (1)..(1): BNA scaffold modification
cuuucauaaugcugg

SEQ ID NO: 1486 - RNA, 15 nt, Artificial Sequence
  Antisense oligonucleotide
  misc_feature (15)..(15): BNA scaffold modification
cuuucauaaugcugg

SEQ ID NO: 1487 - RNA, 15 nt, Artificial Sequence
  Antisense oligonucleotide
  misc_feature (1)..(1): BNA scaffold modification
  misc_feature (15)..(15): BNA scaffold modification
cuuucauaaugcugg

SEQ ID NO: 1488 - RNA, 15 nt, Artificial Sequence
  Antisense oligonucleotide
  misc_feature (1)..(2): BNA scaffold modification
ctuucauaaugcugg

SEQ ID NO: 1489 - RNA, 15 nt, Artificial Sequence
  Antisense oligonucleotide
  misc_feature (14)..(15): BNA scaffold modification
cuuucauaaugcugg

SEQ ID NO: 1490 - RNA, 18 nt, Artificial Sequence
  Antisense oligonucleotide
ucacuuucauaaugcugg

SEQ ID NO: 1491 - RNA, 18 nt, Artificial Sequence
  Antisense oligonucleotide
  misc_feature (1)..(1): BNA scaffold modification
tcacuuucauaaugcugg

SEQ ID NO: 1492 - RNA, 18 nt, Artificial Sequence
  Antisense oligonucleotide
  misc_feature (18)..(18): BNA scaffold modification
ucacuuucauaaugcugg

SEQ ID NO: 1493 - RNA, 18 nt, Artificial Sequence
  Antisense oligonucleotide
  misc_feature (1)..(1): BNA scaffold modification
  misc_feature (18)..(18): BNA scaffold modification
tcacuuucauaaugcugg

SEQ ID NO: 1494 - RNA, 18 nt, Artificial Sequence
  Antisense oligonucleotide
  misc_feature (1)..(2): BNA scaffold modification
tcacuuucauaaugcugg

SEQ ID NO: 1495 - RNA, 18 nt, Artificial Sequence
  Antisense oligonucleotide
  misc_feature (17)..(18): BNA scaffold modification
ucacuuucauaaugcugg

SEQ ID NO: 1496 - RNA, 20 nt, Artificial Sequence
  Antisense oligonucleotide
auucacuuucauaaugcugg

SEQ ID NO: 1497 - RNA, 20 nt, Artificial Sequence
  Antisense oligonucleotide
  misc_feature (1)..(1): BNA scaffold modification
auucacuuucauaaugcugg

SEQ ID NO: 1498 - RNA, 20 nt, Artificial Sequence
  Antisense oligonucleotide
  misc_feature (20)..(20): BNA scaffold modification
auucacuuucauaaugcugg

SEQ ID NO: 1499 - RNA, 20 nt, Artificial Sequence
  Antisense oligonucleotide
  misc_feature (1)..(1): BNA scaffold modification
  misc_feature (20)..(20): BNA scaffold modification
auucacuuucauaaugcugg

SEQ ID NO: 1500 - RNA, 20 nt, Artificial Sequence
  Antisense oligonucleotide
  misc_feature (1)..(2): BNA scaffold modification
atucacuuucauaaugcugg

SEQ ID NO: 1501 - RNA, 20 nt, Artificial Sequence
  Antisense oligonucleotide
  misc_feature (19)..(20): BNA scaffold modification
auucacuuucauaaugcugg

SEQ ID NO: 1502 - RNA, 15 nt, Artificial Sequence
  Antisense oligonucleotide
acuuucauaaugcug

SEQ ID NO: 1503 - RNA, 15 nt, Artificial Sequence
  Antisense oligonucleotide
  misc_feature (1)..(1): BNA scaffold modification
acuuucauaaugcug

SEQ ID NO: 1504 - RNA, 15 nt, Artificial Sequence
  Antisense oligonucleotide
  misc_feature (15)..(15): BNA scaffold modification
acuuucauaaugcug

SEQ ID NO: 1505 - RNA, 15 nt, Artificial Sequence
  Antisense oligonucleotide
  misc_feature (1)..(1): BNA scaffold modification
  misc_feature (15)..(15): BNA scaffold modification
acuuucauaaugcug

SEQ ID NO: 1506 - RNA, 15 nt, Artificial Sequence
  Antisense oligonucleotide
  misc_feature (1)..(2): BNA scaffold modification
acuuucauaaugcug

SEQ ID NO: 1507 - RNA, 15 nt, Artificial Sequence
  Antisense oligonucleotide
  misc_feature (14)..(15): BNA scaffold modification
acuuucauaaugctg

SEQ ID NO: 1508 - RNA, 18 nt, Artificial Sequence
  Antisense oligonucleotide
uucacuuucauaaugcug

SEQ ID NO: 1509 - RNA, 18 nt, Artificial Sequence
  Antisense oligonucleotide
  misc_feature (1)..(1): BNA scaffold modification
tucacuuucauaaugcug

SEQ ID NO: 1510 - RNA, 18 nt, Artificial Sequence
  Antisense oligonucleotide
  misc_feature (18)..(18): BNA scaffold modification
uucacuuucauaaugcug

SEQ ID NO: 1511 - RNA, 18 nt, Artificial Sequence
  Antisense oligonucleotide
  misc_feature (1)..(1): BNA scaffold modification
  misc_feature (18)..(18): BNA scaffold modification
tucacuuucauaaugcug

SEQ ID NO: 1512 - RNA, 18 nt, Artificial Sequence
  Antisense oligonucleotide
  misc_feature (1)..(2): BNA scaffold modification
ttcacuuucauaaugcug

SEQ ID NO: 1513 - RNA, 18 nt, Artificial Sequence
  Antisense oligonucleotide
  misc_feature (17)..(18): BNA scaffold modification
uucacuuucauaaugctg

SEQ ID NO: 1514 - RNA, 15 nt, Artificial Sequence
  Antisense oligonucleotide
cacuuucauaaugcu

SEQ ID NO: 1515 - RNA, 15 nt, Artificial Sequence
  Antisense oligonucleotide
  misc_feature (1)..(1): BNA scaffold modification
cacuuucauaaugcu

SEQ ID NO: 1516 - RNA, 15 nt, Artificial Sequence
  Antisense oligonucleotide
  misc_feature (15)..(15): BNA scaffold modification
cacuuucauaaugct

SEQ ID NO: 1517 - RNA, 15 nt, Artificial Sequence
  Antisense oligonucleotide
  misc_feature (1)..(1): BNA scaffold modification
  misc_feature (15)..(15): BNA scaffold modification
cacuuucauaaugct

SEQ ID NO: 1518 - RNA, 15 nt, Artificial Sequence
  Antisense oligonucleotide
  misc_feature (1)..(2): BNA scaffold modification
cacuuucauaaugcu

SEQ ID NO: 1519 - RNA, 15 nt, Artificial Sequence
  Antisense oligonucleotide
  misc_feature (14)..(15): BNA scaffold modification
cacuuucauaaugct

SEQ ID NO: 1520 - RNA, 15 nt, Artificial Sequence
  Antisense oligonucleotide
ucacuuucauaaugc

SEQ ID NO: 1521 - RNA, 15 nt, Artificial Sequence
  Antisense oligonucleotide
  misc_feature (1)..(1): BNA scaffold modification
tcacuuucauaaugc

SEQ ID NO: 1522 - RNA, 15 nt, Artificial Sequence
  Antisense oligonucleotide
  misc_feature (15)..(15): BNA scaffold modification
ucacuuucauaaugc

SEQ ID NO: 1523 - RNA, 15 nt, Artificial Sequence
  Antisense oligonucleotide
  misc_feature (1)..(1): BNA scaffold modification
  misc_feature (15)..(15): BNA scaffold modification
tcacuuucauaaugc

SEQ ID NO: 1524 - RNA, 15 nt, Artificial Sequence
  Antisense oligonucleotide
  misc_feature (1)..(2): BNA scaffold modification
tcacuuucauaaugc

SEQ ID NO: 1525 - RNA, 15 nt, Artificial Sequence
  Antisense oligonucleotide
  misc_feature (14)..(15): BNA scaffold modification
ucacuuucauaaugc

SEQ ID NO: 1526 - RNA, 15 nt, Artificial Sequence
  Antisense oligonucleotide
uucacuuucauaaug

SEQ ID NO: 1527 - RNA, 15 nt, Artificial Sequence
  Antisense oligonucleotide
  misc_feature (1)..(1): BNA scaffold modification
tucacuuucauaaug

SEQ ID NO: 1528 - RNA, 15 nt, Artificial Sequence
  Antisense oligonucleotide
  misc_feature (15)..(15): BNA scaffold modification
uucacuuucauaaug

SEQ ID NO: 1529 - RNA, 15 nt, Artificial Sequence
  Antisense oligonucleotide
  misc_feature (1)..(1): BNA scaffold modification
  misc_feature (15)..(15): BNA scaffold modification
tucacuuucauaaug

SEQ ID NO: 1530 - RNA, 15 nt, Artificial Sequence
  Antisense oligonucleotide
  misc_feature (1)..(2): BNA scaffold modification
ttcacuuucauaaug

SEQ ID NO: 1531 - RNA, 15 nt, Artificial Sequence
  Antisense oligonucleotide
  misc_feature (14)..(15): BNA scaffold modification
uucacuuucauaatg

SEQ ID NO: 1532 - RNA, 15 nt, Artificial Sequence
  Antisense oligonucleotide
auucacuuucauaau

SEQ ID NO: 1533 - RNA, 15 nt, Artificial Sequence
  Antisense oligonucleotide
  misc_feature (1)..(1): BNA scaffold modification
auucacuuucauaau

SEQ ID NO: 1534 - RNA, 15 nt, Artificial Sequence
  Antisense oligonucleotide
  misc_feature (15)..(15): BNA scaffold modification
auucacuuucauaat

SEQ ID NO: 1535 - RNA, 15 nt, Artificial Sequence
  Antisense oligonucleotide
  misc_feature (1)..(1): BNA scaffold modification
  misc_feature (15)..(15): BNA scaffold modification
auucacuuucauaat

SEQ ID NO: 1536 - RNA, 15 nt, Artificial Sequence
  Antisense oligonucleotide
  misc_feature (1)..(2): BNA scaffold modification
atucacuuucauaau

SEQ ID NO: 1537 - RNA, 15 nt, Artificial Sequence
  Antisense oligonucleotide
  misc_feature (14)..(15): BNA scaffold modification
auucacuuucauaat

SEQ ID NO: 1538 - RNA, 15 nt, Artificial Sequence
  Antisense oligonucleotide
gauucacuuucauaa

SEQ ID NO: 1539 - RNA, 15 nt, Artificial Sequence
  Antisense oligonucleotide
  misc_feature (1)..(1): BNA scaffold modification
gauucacuuucauaa

SEQ ID NO: 1540 - RNA, 15 nt, Artificial Sequence
  Antisense oligonucleotide
  misc_feature (15)..(15): BNA scaffold modification
gauucacuuucauaa

SEQ ID NO: 1541 - RNA, 15 nt, Artificial Sequence
  Antisense oligonucleotide
  misc_feature (1)..(1): BNA scaffold modification
  misc_feature (15)..(15): BNA scaffold modification
gauucacuuucauaa

SEQ ID NO: 1542 - RNA, 15 nt, Artificial Sequence
  Antisense oligonucleotide
  misc_feature (1)..(2): BNA scaffold modification
gauucacuuucauaa

SEQ ID NO: 1543 - RNA, 15 nt, Artificial Sequence
  Antisense oligonucleotide
  misc_feature (14)..(15): BNA scaffold modification
gauucacuuucauaa

SEQ ID NO: 1544 - RNA, 15 nt, Artificial Sequence
  Antisense oligonucleotide
aguaagauucacuuu

SEQ ID NO: 1545 - RNA, 15 nt, Artificial Sequence
  Antisense oligonucleotide
  misc_feature (1)..(1): BNA scaffold modification
aguaagauucacuuu

SEQ ID NO: 1546 - RNA, 15 nt, Artificial Sequence
  Antisense oligonucleotide
  misc_feature (15)..(15): BNA scaffold modification
aguaagauucacuut

SEQ ID NO: 1547 - RNA, 15 nt, Artificial Sequence
  Antisense oligonucleotide
  misc_feature (1)..(1): BNA scaffold modification
  misc_feature (15)..(15): BNA scaffold modification
aguaagauucacuut

SEQ ID NO: 1548 - RNA, 15 nt, Artificial Sequence
  Antisense oligonucleotide
  misc_feature (1)..(2): BNA scaffold modification
aguaagauucacuuu

SEQ ID NO: 1549 - RNA, 15 nt, Artificial Sequence
  Antisense oligonucleotide
  misc_feature (14)..(15): BNA scaffold modification
aguaagauucacutt

SEQ ID NO: 1550 - RNA, 15 nt, Artificial Sequence
  Antisense oligonucleotide
acaaaaguaagauuc

SEQ ID NO: 1551 - RNA, 15 nt, Artificial Sequence
  Antisense oligonucleotide
  misc_feature (1)..(1): BNA scaffold modification
acaaaaguaagauuc

SEQ ID NO: 1552 - RNA, 15 nt, Artificial Sequence
  Antisense oligonucleotide
  misc_feature (15)..(15): BNA scaffold modification
acaaaaguaagauuc

SEQ ID NO: 1553 - RNA, 15 nt, Artificial Sequence
  Antisense oligonucleotide
  misc_feature (1)..(1): BNA scaffold modification
  misc_feature (15)..(15): BNA scaffold modification
acaaaaguaagauuc

SEQ ID NO: 1554 - RNA, 15 nt, Artificial Sequence
  Antisense oligonucleotide
  misc_feature (1)..(2): BNA scaffold modification
acaaaaguaagauuc

SEQ ID NO: 1555 - RNA, 15 nt, Artificial Sequence
  Antisense oligonucleotide
  misc_feature (14)..(15): BNA scaffold modification
acaaaaguaagautc

SEQ ID NO: 1556 - RNA, 15 nt, Artificial Sequence
  Antisense oligonucleotide
guuuuacaaaaguaa

SEQ ID NO: 1557 - RNA, 15 nt, Artificial Sequence
  Antisense oligonucleotide
  misc_feature (1)..(1): BNA scaffold modification
guuuuacaaaaguaa

SEQ ID NO: 1558 - RNA, 15 nt, Artificial Sequence
  Antisense oligonucleotide
  misc_feature (15)..(15): BNA scaffold modification
guuuuacaaaaguaa

SEQ ID NO: 1559 - RNA, 15 nt, Artificial Sequence
  Antisense oligonucleotide
  misc_feature (1)..(1): BNA scaffold modification
  misc_feature (15)..(15): BNA scaffold modification
guuuuacaaaaguaa

SEQ ID NO: 1560 - RNA, 15 nt, Artificial Sequence
  Antisense oligonucleotide
  misc_feature (1)..(2): BNA scaffold modification
gtuuuacaaaaguaa

SEQ ID NO: 1561 - RNA, 15 nt, Artificial Sequence
  Antisense oligonucleotide
  misc_feature (14)..(15): BNA scaffold modification
guuuuacaaaaguaa

SEQ ID NO: 1562 - RNA, 15 nt, Artificial Sequence
  Antisense oligonucleotide
auaaaguuuuacaaa

SEQ ID NO: 1563 - RNA, 15 nt, Artificial Sequence
  Antisense oligonucleotide
  misc_feature (1)..(1): BNA scaffold modification
auaaaguuuuacaaa

SEQ ID NO: 1564 - RNA, 15 nt, Artificial Sequence
  Antisense oligonucleotide
  misc_feature (15)..(15): BNA scaffold modification
auaaaguuuuacaaa

SEQ ID NO: 1565 - RNA, 15 nt, Artificial Sequence
  Antisense oligonucleotide
  misc_feature (1)..(1): BNA scaffold modification
  misc_feature (15)..(15): BNA scaffold modification
auaaaguuuuacaaa

SEQ ID NO: 1566 - RNA, 15 nt, Artificial Sequence
  Antisense oligonucleotide
  misc_feature (1)..(2): BNA scaffold modification
ataaaguuuuacaaa

SEQ ID NO: 1567 - RNA, 15 nt, Artificial Sequence
  Antisense oligonucleotide
  misc_feature (14)..(15): BNA scaffold modification
auaaaguuuuacaaa

SEQ ID NO: 1568 - RNA, 15 nt, Artificial Sequence
  Antisense oligonucleotide
aaaccauaaaguuuu

SEQ ID NO: 1569 - RNA, 15 nt, Artificial Sequence
  Antisense oligonucleotide
  misc_feature (1)..(1): BNA scaffold modification
aaaccauaaaguuuu

SEQ ID NO: 1570 - RNA, 15 nt, Artificial Sequence
  Antisense oligonucleotide
  misc_feature (15)..(15): BNA scaffold modification
aaaccauaaaguuut

SEQ ID NO: 1571 - RNA, 15 nt, Artificial Sequence
  Antisense oligonucleotide
  misc_feature (1)..(1): BNA scaffold modification
  misc_feature (15)..(15): BNA scaffold modification
aaaccauaaaguuut

SEQ ID NO: 1572 - RNA, 15 nt, Artificial Sequence
  Antisense oligonucleotide
  misc_feature (1)..(2): BNA scaffold modification
aaaccauaaaguuuu

SEQ ID NO: 1573 - RNA, 15 nt, Artificial Sequence
  Antisense oligonucleotide
  misc_feature (14)..(15): BNA scaffold modification
aaaccauaaaguutt

SEQ ID NO: 1574 - RNA, 15 nt, Artificial Sequence
  Antisense oligonucleotide
uccacaaaccauaaa

SEQ ID NO: 1575 - RNA, 15 nt, Artificial Sequence
  Antisense oligonucleotide
  misc_feature (1)..(1): BNA scaffold modification
tccacaaaccauaaa

SEQ ID NO: 1576 - RNA, 15 nt, Artificial Sequence
  Antisense oligonucleotide
  misc_feature (15)..(15): BNA scaffold modification
uccacaaaccauaaa

SEQ ID NO: 1577 - RNA, 15 nt, Artificial Sequence
  Antisense oligonucleotide
  misc_feature (1)..(1): BNA scaffold modification
  misc_feature (15)..(15): BNA scaffold modification
tccacaaaccauaaa

SEQ ID NO: 1578 - RNA, 15 nt, Artificial Sequence
  Antisense oligonucleotide
  misc_feature (1)..(2): BNA scaffold modification
uccacaaaccauaaa

SEQ ID NO: 1579 - RNA, 15 nt, Artificial Sequence
  Antisense oligonucleotide
  misc_feature (14)..(15): BNA scaffold modification
uccacaaaccauaaa

SEQ ID NO: 1580 - RNA, 30 nt, Artificial Sequence
  Antisense oligonucleotide
cuccaacaucaaggaagauggcauuucuag

SEQ ID NO: 1581 - protein, 293 aa, Homo sapiens
MAMSSGGSGGGVPEQEDSVLFRRGTGQSDDSDIWDDTALIKAYDKAVASFKHALKNGDICETSGKPKTTPKRKPAKKNKSQKKNTAASLQQWKVGDKCSAIWSEDGCIYPATIASIDFKRETCVVVYTGYGNREEQNLSDLLSPICEVANNIEQNAQENENESQVSTDESENSRSPGNKSDNIKPKSAPWNSFLPPPPPMPGPRLGPGKPGLKFNGPPPPPPPPPPHLLSCWLPPFPSGPPIIPPPPPICPDSLDDADALGSMLISWYMSGYHTGYYMGFRQNQKEGRCHSLN

SEQ ID NO: 1582 - RNA, 921 nt, Homo sapiens
auggcgaugagcagcggcggcagugguggcggcgucccggagcaggaggauuccgugcuguuccggcgcggcacaggccagagcgaugauucugacauuugggaugauacagcacugauaaaagcauaugauaaagcuguggcuucauuuaagcaugcucuaaagaauggugacauuugugaaacuucggguaaaccaaaaaccacaccuaaaagaaaaccugcuaagaagaauaaaagccaaaagaagaauacugcagcuuccuuacaacaguggaaaguuggggacaaauguucugccauuuggucagaagacgguugcauuuacccagcuaccauugcuucaauugauuuuaagagagaaaccuguguugugguuuacacuggauauggaaauagagaggagcaaaaucuguccgaucuacuuuccccaaucugugaaguagcuaauaauauagaacaaaaugcucaagagaaugaaaaugaaagccaaguuucaacagaugaaagugagaacuccaggucuccuggaaauaaaucagauaacaucaagcccaaaucugcuccauggaacucuuuucucccuccaccaccccccaugccagggccaagacugggaccaggaaagccaggucuaaaauucaauggcccaccaccgccaccgccaccaccaccaccccacuuacuaucaugcuggcugccuccauuuccuucuggaccaccaauaauucccccaccaccucccauauguccagauucucuugaugaugcugaugcuuugggaaguauguuaauuucaugguacaugaguggcuaucauacuggcuauuauauggguuuuagacaaaaucaaaaagaaggaaggugcucacauuccuuaaauuaaggagaaaugcuggcauagagcagcacuaaaugacac

SEQ ID NO: 1583 - RNA, 5769 nt, Artificial Sequence
  SMN2 intron 6
guaaguaaucacucagcaucuuuuccugacaauuuuuuuguaguuaugugacuuuguuuuguaaauuuauaaaauacuacuugcuucucucuuuauauuacuaaaaaauaaaaauaaaaaaauacaacugucugaggcuuaaauuacucuugcauugucccuaaguauaauuuuaguuaauuuuaaaaagcuuucaugcuauuguuagauuauuuugauuauacacuuuugaauugaaauuauacuuuuucuaaauaauguuuuaaucucugauuugaaauugauuguagggaauggaaaagaugggauaauuuuucauaaaugaaaaaugaaauucuuuuuuuuuuuuuuuuuuuuuugagacggagucuugcucuguugcccaggcuggagugcaauggcgugaucuuggcucacagcaagcucugccuccuggauucacgccauucuccugccucagccucagagguagcugggacuacaggugccugccaccacgccugucuaauuuuuuguauuuuuuuguaaagacaggguuucacuguguuagccaggauggucucaaucuccugaccccgugauccacccgccucggccuuccaagagaaaugaaauuuuuuuaaugcacaaagaucugggguaauguguaccacauugaaccuuggggaguauggcuucaaacuugucacuuuauacguuagucuccuacggacauguucuauuguauuuuagucagaacauuuaaaauuauuuuauuuuauuuuauuuuuuuuuuuuuuuugagacggagucucgcucugucacccaggcuggaguacaguggcgcagucucggcucacugcaagcuccgccucccggguucacgccauucuccugccucagccucuccgaguagcugggacuacaggcgcccgccaccacgcccggcuaauuuuuuuuuauuuuuaguagagacgggguuucaccguggucucgaucuccugaccucgugauccacccgccucggccucccaaagugcugggauuacaagcgugagccaccgcgcccggccuaaaauuauuuuuaaaaguaagcucuugugcccugcuaaaauuaugaugugauauuguaggcacuuguauuuuuaguaaauuaauauagaagaaacaacugacuuaaagguguauguuuuuaaauguaucaucugugugugcccccauuaauauucuuauuuaaaaguuaaggccagacaugguggcuuacaacuguaaucccaacaguuugugaggccgaggcaggcagaucacuugaggucaggaguuugagaccagccuggccaacaugaugaaaccuugucucuacuaaaaauaccaaaaaaaauuuagccaggcaugguggcacaugccuguaauccgagcuacuugggaggcuguggcaggaaaauugcuuuaaucugggaggcagagguugcagugaguugagauugugccacugcacuccacccuuggugacagagugagauuccaucucaaaaaaagaaaaaggccuggcacgguggcucacaccuauaaucccaguacuuugggagguagaggcagguggaucacuugagguuaggaguucaggaccagccuggccaacauggugacuacuccauuucuacuaaauacacaaaacuuagcccaguggcgggcaguuguaaucccagcuacuugagagguugaggcaggagaaucacuugaaccugggaggcagagguugcagugagccgagaucacaccgcugcacucuagccuggccaacagagugagaauuugcggagggaaaaaaaagucacgcuucaguuguuguaguauaaccuugguauauuguauguaucaugaauuccucauuuuaaugaccaaaaaguaauaaaucaacagcuuguaauuuguuuugagaucaguuaucugacuguaacacuguaggcuuuuguguuuuuuaaauuaugaaauauuugaaaaaaauacauaauguauauauaaaguauugguauaauuuauguucuaaauaacuuucuugagaaauaauucacauggugugcaguuuaccuuugaaaguauacaaguuggcugggcacaauggcucacgccuguaaucccagcacuuugggaggccagggcagguggaucacgaggucaggagaucgagaccauccuggcuaacauggugaaaccccgucucuacuaaaaguacaaaaacaaauuagccgggcauguuggcgggcaccuuuugucccagcugcucgggaggcugaggcaggagaguggcgugaacccaggagguggagcuugcagugagccgagauugugccagugcacuccagccugggcgacagagcgagacucugucucaaaaaauaaaauaaaaaagaaaguauacaagucagugguuuugguuuucaguuaugcaaccaucacuacaauuuaagaacauuuucaucaccccaaaaagaaacccuguuaccuucauuuuccccagcccuaggcagucaguacacuuucugucucuaugaauuugucuauuuuagauauuauauauaaacggaauuauacgauauguggucuuuugugucuggcuucuuucacuuagcaugcuauuuucaagauucauccaugcuguagaaugcaccaguacugcauuccuucuuauugcugaauauucuguuguuugguuauaucacauuuuauccauucaucaguucauggacauuuagguuguuuuuauuuuugggcuauaaugaauaauguugcuaugaacauucguuuguguucuuuuuguuuuuuugguuuuuuggguuuuuuuuguuuuguuuuuguuuuugagacagucuugcucugucuccuaagcuggagugcaguggcaugaucuuggcuuacugcaagcucugccucccggguucacaccauucuccugccucagcccgacaaguagcugggacuacaggcgugugccaccaugcacggcuaauuuuuuguauuuuuaguagagaugggguuucaccguguuagccaggauggucucgaucuccugaccucgugaucugccugccuaggccucccaaagugcugggauuacaggcgugagccacugcaccuggccuuaaguguuuuuaauacgucauugccuuaagcuaacaauucuuaaccuuuguucuacugaagccacgugguugagauaggcucugagucuagcuuuuaaccucuaucuuuuugucuuagaaaucuaagcagaaugcaaaugacuaagaauaauguuguugaaauaacauaaaauagguuauaacuuugauacucauuaguaacaaaucuuucaauacaucuuacggucuguuagguguagauuaguaaugaagugggaagccacugcaagcuaguauacauguagggaaagauagaaagcauugaagccagaagagagacagaggacauuugggcuagaucugacaagaaaaacaaauguuuuaguauuaauuuuugacuuuaaauuuuuuuuuuauuuagugaauacugguguuuaauggucucauuuuaauaaguaugacacagguaguuuaaggucauauauuuuauuugaugaaaauaagguauaggccgggcacgguggcucacaccuguaaucccagcacuuugggaggccgaggcaggcggaucaccugaggucgggaguuagagacuagccucaacauggagaaaccccgucucuacuaaaaaaaauacaaaauuaggcgggcgugguggugcaugccuguaaucccagcuacucaggaggcugaggcaggagaauugcuugaaccugggagguggagguugcggugagccgagaucaccucauugcacuccagccugggcaacaagagcaaaacuccaucucaaaaaaaaaaaaauaagguauaagcgggcucaggaacaucauuggacauacugaaagaagaaaaaucagcugggcgcaguggcucacgccgguaaucccaacacuuugggaggccaaggcaggcgaaucaccugaagucgggaguuccagaucagccugaccaacauggagaaacccugucucuacuaaaaauacaaaacuagccgggcaugguggcgcaugccuguaaucccagcuacuugggaggcugaggcaggagaauugcuugaaccgagaaggcggagguugcggugagccaagauugcaccauugcacuccagccugggcaacaagagcgaaacuccgucucaaaaaaaaaaggaagaaaaauauuuuuuuaaauuaauuaguuuauuuauuuuuuaagauggaguuuugcccugucacccaggcuggggugcaauggugcaaucucggcucacugcaaccuccgccuccuggguucaagugauucuccugccucagcuucccgaguagcugugauuacagccauaugccaccacgcccagccaguuuuguguuuuguuuuguuuuuuguuuuuuuuuuuugagagggugucuugcucugucccccaagcuggagugcagcggcgcgaucuuggcucacugcaagcucugccucccagguucacaccauucucuugccucagccucccgaguagcugggacuacaggugcccgccaccacacccggcuaauuuuuuuguguuuuuaguagagaugggguuucacuguguuagccaggauggucucgaucuccugaccuuuugauccacccgccucagccuccccaagugcugggauuauaggcgugagccacugugcccggccuagucuuguauuuuuaguagagucgggauuucuccauguuggucaggcuguucuccaaauccgaccucaggugauccgcccgccuuggccuccaaaagugcaaggcaaggcauuacaggcaugagccacugugaccggcaauguuuuuaaauuuuuuacauuuaaauuuuauuuuuuagagaccaggucucacucuauugcucaggcuggagugcaagggcacauucacagcucacugcagccuugaccuccagggcucaagcaguccucucaccucaguuucccgaguagcugggacuacagugauaaugccacugcaccuggcuaauuuuuauuuuuauuuauuuauuuuuuuuugagacagagucuugcucugucacccaggcuggagugcagugguguaaaucucagcucacugcagccuccgccuccuggguucaagugauucuccugccucaaccucccaaguagcugggauuagagguccccaccaccaugccuggcuaauuuuuuguacuuucaguagaaacgggguuuugccauguuggccaggcuguucucgaacuccugagcucaggugauccaacugucucggccucccaaagugcugggauuacaggcgugagccacugugccuagccugagccaccacgccggccuaauuuuuaaauuuuuuguagagacagggucucauuauguugcccaggguggugucaagcuccaggucucaagugaucccccuaccuccgccucccaaaguugugggauuguaggcaugagccacugcaagaaaaccuuaacugcagccuaauaauuguuuucuuugggauaacuuuuaaaguacauuaaaagacuaucaacuuaauuucugaucauauuuuguugaauaaaauaaguaaaaugucuugugaaacaaaaugcuuuuuaacauccauauaaagcuaucuauauauagcuaucuauaucuauauagcuauuuuuuuuaacuuccuuuauuuuccuuacag

SEQ ID NO: 1584 - RNA, 54 nt, Artificial Sequence
  SMN2 exon 7
gguuuuagacaaaaucaaaaagaaggaaggugcucacauuccuuaaauuaagga

SEQ ID NO: 1585 - RNA, 444 nt, Artificial Sequence
  SMN2 intron 7
guaagucugccagcauuaugaaagugaaucuuacuuuuguaaaacuuuaugguuuguggaaaacaaauguuuuugaacauuuaaaaaguucagauguuagaaaguugaaagguuaauguaaaacaaucaauauuaaagaauuuugaugccaaaacuauuagauaaaagguuaaucuacaucccuacuagaauucucauacuuaacugguugguuguguggaagaaacauacuuucacaauaaagagcuuuaggauaugaugccauuuuauaucacuaguaggcagaccagcagacuuuuuuuuauugugauaugggauaaccuaggcauacugcacuguacacucugacauaugaagugcucuagucaaguuuaacugguguccacagaggacaugguuuaacuggaauucgucaagccucugguucuaauuucucauuugcag

SEQ ID NO: 1586 - DNA, 26 bp, Artificial Sequence
  DMD 47/52 Forward primer
tgaaaataagctcaagcagacaaatc

SEQ ID NO: 1587 - DNA, 20 bp, Artificial Sequence
  DMD 47/52 Reverse primer
gacgcctctgttccaaatcc

SEQ ID NO: 1588 - DNA, 18 bp, Artificial Sequence
  DMD 47/52 Probe
cagtggataaaggcaaca

SEQ ID NO: 1589 - DNA, 21 bp, Artificial Sequence
  DMD 51/52 Forward primer
gtgatggtgggtgaccttgag

SEQ ID NO: 1590 - DNA, 20 bp, Artificial Sequence
  DMD 51/52 Reverse primer
gacgcctctgttccaaatcc

SEQ ID NO: 1591 - DNA, 17 bp, Artificial Sequence
  DMD 51/52 Probe
caagcagaaggcaacaa

SEQ ID NO: 1592 - RNA, 20 nt, Artificial Sequence
  Antisense oligonucleotide
  misc_feature (1)..(1): n is thymidine with BNA scaffold modification or uridine with BNA scaffold modification
  misc_feature (2)..(2): n is 2'-O-methyl-5-methylcytidine
  misc_feature (3)..(3): n is 2'-O-methyladenosine
  misc_feature (4)..(4): n is 2'-O-methyladenosine
  misc_feature (5)..(5): n is 2'-O-methylguanosine
  misc_feature (6)..(6): n is 2'-O-methylguanosine
  misc_feature (7)..(7): n is 2'-O-methyladenosine
  misc_feature (8)..(8): n is 2'-O-methyladenosine
  misc_feature (9)..(9): n is 2'-O-methylguanosine
  misc_feature (10)..(10): n is 2'-O-methyladenosine
  misc_feature (11)..(11): n is 2'-O-methyluridine
  misc_feature (12)..(12): n is 2'-O-methylguanosine
  misc_feature (13)..(13): n is 2'-O-methylguanosine
  misc_feature (14)..(14): n is 2'-O-methyl-5-methylcytidine
  misc_feature (15)..(15): n is 2'-O-methyladenosine
  misc_feature (16)..(16): n is 2'-O-methyluridine
  misc_feature (17)..(17): n is 2'-O-methyluridine
  misc_feature (18)..(18): n is 2'-O-methyluridine
  misc_feature (19)..(19): n is 2'-O-methyl-5-methylcytidine
  misc_feature (20)..(20): n is 2'-O-methyluridine
nnnnnnnnnnnnnnnnnnnn

SEQ ID NO: 1593 - RNA, 20 nt, Artificial Sequence
  Antisense oligonucleotide
  misc_feature (1)..(1): n is thymidine with BNA scaffold modification or uridine with BNA scaffold modification
  misc_feature (2)..(2): n is 2'-O-methyl-5-methylcytidine
  misc_feature (3)..(3): n is 2'-O-methyladenosine
  misc_feature (4)..(4): n is 2'-O-methyladenosine
  misc_feature (5)..(5): n is 2'-O-methylguanosine
  misc_feature (6)..(6): n is 2'-O-methylguanosine
  misc_feature (7)..(7): n is 2'-O-methyladenosine
  misc_feature (8)..(8): n is 2'-O-methyladenosine
  misc_feature (9)..(9): n is 2'-O-methylguanosine
  misc_feature (10)..(10): n is 2'-O-methyladenosine
  misc_feature (11)..(11): n is 2'-O-methyluridine
  misc_feature (12)..(12): n is 2'-O-methylguanosine
  misc_feature (13)..(13): n is 2'-O-methylguanosine
  misc_feature (14)..(14): n is 2'-O-methyl-5-methylcytidine
  misc_feature (15)..(15): n is 2'-O-methyladenosine
  misc_feature (16)..(16): n is 2'-O-methyluridine
  misc_feature (17)..(17): n is 2'-O-methyluridine
  misc_feature (18)..(18): n is 2'-O-methyluridine
  misc_feature (19)..(19): n is 2'-O-methyl-5-methylcytidine
  misc_feature (20)..(20): n is thymidine with BNA scaffold modification or uridine with BNA scaffold modification
nnnnnnnnnnnnnnnnnnnn

SEQ ID NO: 1594 - RNA, 20 nt, Artificial Sequence
  Antisense oligonucleotide
  misc_feature (1)..(1): n is thymidine with BNA scaffold modification or uridine with BNA scaffold modification
  misc_feature (2)..(2): n is 5-methylcytidine with BNA scaffold modification
  misc_feature (3)..(3): n is 2'-O-methyladenosine
  misc_feature (4)..(4): n is 2'-O-methyladenosine
  misc_feature (5)..(5): n is 2'-O-methylguanosine
  misc_feature (6)..(6): n is 2'-O-methylguanosine
  misc_feature (7)..(7): n is 2'-O-methyladenosine
  misc_feature (8)..(8): n is 2'-O-methyladenosine
  misc_feature (9)..(9): n is 2'-O-methylguanosine
  misc_feature (10)..(10): n is 2'-O-methyladenosine
  misc_feature (11)..(11): n is 2'-O-methyluridine
  misc_feature (12)..(12): n is 2'-O-methylguanosine
  misc_feature (13)..(13): n is 2'-O-methylguanosine
  misc_feature (14)..(14): n is 2'-O-methyl-5-methylcytidine
  misc_feature (15)..(15): n is 2'-O-methyladenosine
  misc_feature (16)..(16): n is 2'-O-methyluridine
  misc_feature (17)..(17): n is 2'-O-methyluridine
  misc_feature (18)..(18): n is 2'-O-methyluridine
  misc_feature (19)..(19): n is 2'-O-methyl-5-methylcytidine
  misc_feature (20)..(20): n is 2'-O-methyluridine
nnnnnnnnnnnnnnnnnnnn

SEQ ID NO: 1595 - RNA, 22 nt, Artificial Sequence
  Antisense oligonucleotide
  misc_feature (1)..(1): n is thymidine with BNA scaffold modification or uridine with BNA scaffold modification
  misc_feature (2)..(2): n is 2'-O-methyl-5-methylcytidine
  misc_feature (3)..(3): n is 2'-O-methyladenosine
  misc_feature (4)..(4): n is 2'-O-methyladenosine
  misc_feature (5)..(5): n is 2'-O-methylguanosine
  misc_feature (6)..(6): n is 2'-O-methylguanosine
  misc_feature (7)..(7): n is 2'-O-methyladenosine
  misc_feature (8)..(8): n is 2'-O-methyladenosine
  misc_feature (9)..(9): n is 2'-O-methylguanosine
  misc_feature (10)..(10): n is 2'-O-methyladenosine
  misc_feature (11)..(11): n is 2'-O-methyluridine
  misc_feature (12)..(12): n is 2'-O-methylguanosine
  misc_feature (13)..(13): n is 2'-O-methylguanosine
  misc_feature (14)..(14): n is 2'-O-methyl-5-methylcytidine
  misc_feature (15)..(15): n is 2'-O-methyladenosine
  misc_feature (16)..(16): n is 2'-O-methyluridine
  misc_feature (17)..(17): n is 2'-O-methyluridine
  misc_feature (18)..(18): n is 2'-O-methyluridine
  misc_feature (19)..(19): n is 2'-O-methyl-5-methylcytidine
  misc_feature (20)..(20): n is 2'-O-methyluridine
  misc_feature (21)..(21): n is 2'-O-methyladenosine
  misc_feature (22)..(22): n is 2'-O-methylguanosine
nnnnnnnnnnnnnnnnnnnnnn

SEQ ID NO: 1596 - RNA, 22 nt, Artificial Sequence
  Antisense oligonucleotide
  misc_feature (1)..(1): n is thymidine with BNA scaffold modification or uridine with BNA scaffold modification
  misc_feature (2)..(2): n is 2'-O-methyl-5-methylcytidine
  misc_feature (3)..(3): n is 2'-O-methyladenosine
  misc_feature (4)..(4): n is 2'-O-methyladenosine
  misc_feature (5)..(5): n is 2'-O-methylguanosine
  misc_feature (6)..(6): n is 2'-O-methylguanosine
  misc_feature (7)..(7): n is 2'-O-methyladenosine
  misc_feature (8)..(8): n is 2'-O-methyladenosine
  misc_feature (9)..(9): n is 2'-O-methylguanosine
  misc_feature (10)..(10): n is 2'-O-methyladenosine
  misc_feature (11)..(11): n is 2'-O-methyluridine
  misc_feature (12)..(12): n is 2'-O-methylguanosine
  misc_feature (13)..(13): n is 2'-O-methylguanosine
  misc_feature (14)..(14): n is 2'-O-methyl-5-methylcytidine
  misc_feature (15)..(15): n is 2'-O-methyladenosine
  misc_feature (16)..(16): n is 2'-O-methyluridine
  misc_feature (17)..(17): n is 2'-O-methyluridine
  misc_feature (18)..(18): n is 2'-O-methyluridine
  misc_feature (19)..(19): n is 2'-O-methyl-5-methylcytidine
  misc_feature (20)..(20): n is 2'-O-methyluridine
  misc_feature (21)..(21): n is 2'-O-methyladenosine
  misc_feature (22)..(22): n is guanosine with BNA scaffold modification
nnnnnnnnnnnnnnnnnnnnnn

SEQ ID NO: 1597 - RNA, 22 nt, Artificial Sequence
  Antisense oligonucleotide
  misc_feature (1)..(1): n is thymidine with BNA scaffold modification or uridine with BNA scaffold modification
  misc_feature (2)..(2): n is 5-methylcytidine with BNA scaffold modification
  misc_feature (3)..(3): n is 2'-O-methyladenosine
  misc_feature (4)..(4): n is 2'-O-methyladenosine
  misc_feature (5)..(5): n is 2'-O-methylguanosine
  misc_feature (6)..(6): n is 2'-O-methylguanosine
  misc_feature (7)..(7): n is 2'-O-methyladenosine
  misc_feature (8)..(8): n is 2'-O-methyladenosine
  misc_feature (9)..(9): n is 2'-O-methylguanosine
  misc_feature (10)..(10): n is 2'-O-methyladenosine
  misc_feature (11)..(11): n is 2'-O-methyluridine
  misc_feature (12)..(12): n is 2'-O-methylguanosine
  misc_feature (13)..(13): n is 2'-O-methylguanosine
  misc_feature (14)..(14): n is 2'-O-methyl-5-methylcytidine
  misc_feature (15)..(15): n is 2'-O-methyladenosine
  misc_feature (16)..(16): n is 2'-O-methyluridine
  misc_feature (17)..(17): n is 2'-O-methyluridine
  misc_feature (18)..(18): n is 2'-O-methyluridine
  misc_feature (19)..(19): n is 2'-O-methyl-5-methylcytidine
  misc_feature (20)..(20): n is 2'-O-methyluridine
  misc_feature (21)..(21): n is 2'-O-methyladenosine
  misc_feature (22)..(22): n is 2'-O-methylguanosine
nnnnnnnnnnnnnnnnnnnnnn

SEQ ID NO: 1598 - RNA, 18 nt, Artificial Sequence
  Antisense oligonucleotide
  misc_feature (1)..(1): n is adenosine with BNA scaffold modification
  misc_feature (2)..(2): n is 2'-O-methyladenosine
  misc_feature (3)..(3): n is 2'-O-methylguanosine
  misc_feature (4)..(4): n is 2'-O-methylguanosine
  misc_feature (5)..(5): n is 2'-O-methyladenosine
  misc_feature (6)..(6): n is 2'-O-methyladenosine
  misc_feature (7)..(7): n is 2'-O-methylguanosine
  misc_feature (8)..(8): n is 2'-O-methyladenosine
  misc_feature (9)..(9): n is 2'-O-methyluridine
  misc_feature (10)..(10): n is 2'-O-methylguanosine
  misc_feature (11)..(11): n is 2'-O-methylguanosine
  misc_feature (12)..(12): n is 2'-O-methyl-5-methylcytidine
  misc_feature (13)..(13): n is 2'-O-methyladenosine
  misc_feature (14)..(14): n is 2'-O-methyluridine
  misc_feature (15)..(15): n is 2'-O-methyluridine
  misc_feature (16)..(16): n is 2'-O-methyluridine
  misc_feature (17)..(17): n is 2'-O-methyl-5-methylcytidine
  misc_feature (18)..(18): n is 2'-O-methyluridine
nnnnnnnnnnnnnnnnnn

SEQ ID NO: 1599 - RNA, 18 nt, Artificial Sequence
  Antisense oligonucleotide
  misc_feature (1)..(1): n is adenosine with BNA scaffold modification
  misc_feature (2)..(2): n is 2'-O-methyladenosine
  misc_feature (3)..(3): n is 2'-O-methylguanosine
  misc_feature (4)..(4): n is 2'-O-methylguanosine
  misc_feature (5)..(5): n is 2'-O-methyladenosine
  misc_feature (6)..(6): n is 2'-O-methyladenosine
  misc_feature (7)..(7): n is 2'-O-methylguanosine
  misc_feature (8)..(8): n is 2'-O-methyladenosine
  misc_feature (9)..(9): n is 2'-O-methyluridine
  misc_feature (10)..(10): n is 2'-O-methylguanosine
  misc_feature (11)..(11): n is 2'-O-methylguanosine
  misc_feature (12)..(12): n is 2'-O-methyl-5-methylcytidine
  misc_feature (13)..(13): n is 2'-O-methyladenosine
  misc_feature (14)..(14): n is 2'-O-methyluridine
  misc_feature (15)..(15): n is 2'-O-methyluridine
  misc_feature (16)..(16): n is 2'-O-methyluridine
  misc_feature (17)..(17): n is 2'-O-methyl-5-methylcytidine
  misc_feature (18)..(18): n is thymidine with BNA scaffold modification or uridine with BNA scaffold modification
nnnnnnnnnnnnnnnnnn

SEQ ID NO: 1600 - RNA, 18 nt, Artificial Sequence
  Antisense oligonucleotide
  misc_feature (1)..(1): n is adenosine with BNA scaffold modification
  misc_feature (2)..(2): n is adenosine with BNA scaffold modification
  misc_feature (3)..(3): n is 2'-O-methylguanosine
  misc_feature (4)..(4): n is 2'-O-methylguanosine
  misc_feature (5)..(5): n is 2'-O-methyladenosine
  misc_feature (6)..(6): n is 2'-O-methyladenosine
  misc_feature (7)..(7): n is 2'-O-methylguanosine
  misc_feature (8)..(8): n is 2'-O-methyladenosine
  misc_feature (9)..(9): n is 2'-O-methyluridine
  misc_feature (10)..(10): n is 2'-O-methylguanosine
  misc_feature (11)..(11): n is 2'-O-methylguanosine
  misc_feature (12)..(12): n is 2'-O-methyl-5-methylcytidine
  misc_feature (13)..(13): n is 2'-O-methyladenosine
  misc_feature (14)..(14): n is 2'-O-methyluridine
  misc_feature (15)..(15): n is 2'-O-methyluridine
  misc_feature (16)..(16): n is 2'-O-methyluridine
  misc_feature (17)..(17): n is 2'-O-methyl-5-methylcytidine
  misc_feature (18)..(18): n is 2'-O-methyluridine
nnnnnnnnnnnnnnnnnn

SEQ ID NO: 1601 - RNA, 16 nt, Artificial Sequence
  Antisense oligonucleotide
  misc_feature (1)..(1): n is guanosine with BNA scaffold modification
  misc_feature (2)..(2): n is 2'-O-methylguanosine
  misc_feature (3)..(3): n is 2'-O-methyladenosine
  misc_feature (4)..(4): n is 2'-O-methyladenosine
  misc_feature (5)..(5): n is 2'-O-methylguanosine
  misc_feature (6)..(6): n is 2'-O-methyladenosine
  misc_feature (7)..(7): n is 2'-O-methyluridine
  misc_feature (8)..(8): n is 2'-O-methylguanosine
  misc_feature (9)..(9): n is 2'-O-methylguanosine
  misc_feature (10)..(10): n is 2'-O-methyl-5-methylcytidine
  misc_feature (11)..(11): n is 2'-O-methyladenosine
  misc_feature (12)..(12): n is 2'-O-methyluridine
  misc_feature (13)..(13): n is 2'-O-methyluridine
  misc_feature (14)..(14): n is 2'-O-methyluridine
  misc_feature (15)..(15): n is 2'-O-methyl-5-methylcytidine
  misc_feature (16)..(16): n is 2'-O-methyluridine
nnnnnnnnnnnnnnnn

SEQ ID NO: 1602 - RNA, 16 nt, Artificial Sequence
  Antisense oligonucleotide
  misc_feature (1)..(1): n is guanosine with BNA scaffold modification
  misc_feature (2)..(2): n is 2'-O-methylguanosine
  misc_feature (3)..(3): n is 2'-O-methyladenosine
  misc_feature (4)..(4): n is 2'-O-methyladenosine
  misc_feature (5)..(5): n is 2'-O-methylguanosine
  misc_feature (6)..(6): n is 2'-O-methyladenosine
  misc_feature (7)..(7): n is 2'-O-methyluridine
  misc_feature (8)..(8): n is 2'-O-methylguanosine
  misc_feature (9)..(9): n is 2'-O-methylguanosine
  misc_feature (10)..(10): n is 2'-O-methyl-5-methylcytidine
  misc_feature (11)..(11): n is 2'-O-methyladenosine
  misc_feature (12)..(12): n is 2'-O-methyluridine
  misc_feature (13)..(13): n is 2'-O-methyluridine
  misc_feature (14)..(14): n is 2'-O-methyluridine
  misc_feature (15)..(15): n is 2'-O-methyl-5-methylcytidine
  misc_feature (16)..(16): n is thymidine with BNA scaffold modification or uridine with BNA scaffold modification
nnnnnnnnnnnnnnnn

SEQ ID NO: 1603 - RNA, 16 nt, Artificial Sequence
  Antisense oligonucleotide
  misc_feature (1)..(1): n is guanosine with BNA scaffold modification
  misc_feature (2)..(2): n is guanosine with BNA scaffold modification
  misc_feature (3)..(3): n is 2'-O-methyladenosine
  misc_feature (4)..(4): n is 2'-O-methyladenosine
  misc_feature (5)..(5): n is 2'-O-methylguanosine
  misc_feature (6)..(6): n is 2'-O-methyladenosine
  misc_feature (7)..(7): n is 2'-O-methyluridine
  misc_feature (8)..(8): n is 2'-O-methylguanosine
  misc_feature (9)..(9): n is 2'-O-methylguanosine
  misc_feature (10)..(10): n is 2'-O-methyl-5-methylcytidine
  misc_feature (11)..(11): n is 2'-O-methyladenosine
  misc_feature (12)..(12): n is 2'-O-methyluridine
  misc_feature (13)..(13): n is 2'-O-methyluridine
  misc_feature (14)..(14): n is 2'-O-methyluridine
  misc_feature (15)..(15): n is 2'-O-methyl-5-methylcytidine
  misc_feature (16)..(16): n is 2'-O-methyluridine
nnnnnnnnnnnnnnnn

SEQ ID NO: 1604 - RNA, 16 nt, Artificial Sequence
  Antisense oligonucleotide
  misc_feature (1)..(1): n is thymidine with BNA scaffold modification or uridine with BNA scaffold modification
  misc_feature (2)..(2): n is 2'-O-methyl-5-methylcytidine
  misc_feature (3)..(3): n is 2'-O-methyladenosine
  misc_feature (4)..(4): n is 2'-O-methyladenosine
  misc_feature (5)..(5): n is 2'-O-methylguanosine
  misc_feature (6)..(6): n is 2'-O-methylguanosine
  misc_feature (7)..(7): n is 2'-O-methyladenosine
  misc_feature (8)..(8): n is 2'-O-methyladenosine
  misc_feature (9)..(9): n is 2'-O-methylguanosine
  misc_feature (10)..(10): n is 2'-O-methyladenosine
  misc_feature (11)..(11): n is 2'-O-methyluridine
  misc_feature (12)..(12): n is 2'-O-methylguanosine
  misc_feature (13)..(13): n is 2'-O-methylguanosine
  misc_feature (14)..(14): n is 2'-O-methyl-5-methylcytidine
  misc_feature (15)..(15): n is 2'-O-methyladenosine
  misc_feature (16)..(16): n is 2'-O-methyluridine
nnnnnnnnnnnnnnnn

SEQ ID NO: 1605 - RNA, 16 nt, Artificial Sequence
  Antisense oligonucleotide
  misc_feature (1)..(1): n is thymidine with BNA scaffold modification or uridine with BNA scaffold modification
  misc_feature (2)..(2): n is 5-methylcytidine with BNA scaffold modification
  misc_feature (3)..(3): n is 2'-O-methyladenosine
  misc_feature (4)..(4): n is 2'-O-methyladenosine
  misc_feature (5)..(5): n is 2'-O-methylguanosine
  misc_feature (6)..(6): n is 2'-O-methylguanosine
  misc_feature (7)..(7): n is 2'-O-methyladenosine
  misc_feature (8)..(8): n is 2'-O-methyladenosine
  misc_feature (9)..(9): n is 2'-O-methylguanosine
  misc_feature (10)..(10): n is 2'-O-methyladenosine
  misc_feature (11)..(11): n is 2'-O-methyluridine
  misc_feature (12)..(12): n is 2'-O-methylguanosine
  misc_feature (13)..(13): n is 2'-O-methylguanosine
  misc_feature (14)..(14): n is 2'-O-methyl-5-methylcytidine
  misc_feature (15)..(15): n is 2'-O-methyladenosine
  misc_feature (16)..(16): n is 2'-O-methyluridine
nnnnnnnnnnnnnnnn

SEQ ID NO: 1606 - RNA, 18 nt, Artificial Sequence
  Antisense oligonucleotide
  misc_feature (1)..(1): n is 2'-O-methyluridine
  misc_feature (2)..(2): n is 2'-O-methyl-5-methylcytidine
  misc_feature (3)..(3): n is 2'-O-methyladenosine
  misc_feature (4)..(4): n is 2'-O-methyl-5-methylcytidine
  misc_feature (5)..(5): n is 2'-O-methyluridine
  misc_feature (6)..(6): n is 2'-O-methyluridine
  misc_feature (7)..(7): n is 2'-O-methyluridine
  misc_feature (8)..(8): n is 2'-O-methyl-5-methylcytidine
  misc_feature (9)..(9): n is 2'-O-methyladenosine
  misc_feature (10)..(10): n is 2'-O-methyluridine
  misc_feature (11)..(11): n is 2'-O-methyladenosine
  misc_feature (12)..(12): n is 2'-O-methyladenosine
  misc_feature (13)..(13): n is 2'-O-methyluridine
  misc_feature (14)..(14): n is 2'-O-methylguanosine
  misc_feature (15)..(15): n is 2'-O-methyl-5-methylcytidine
  misc_feature (16)..(16): n is 2'-O-methyluridine
  misc_feature (17)..(17): n is 2'-O-methylguanosine
  misc_feature (18)..(18): n is 2'-O-methylguanosine
nnnnnnnnnnnnnnnnnn

SEQ ID NO: 1607 - RNA, 30 nt, Artificial Sequence
  Antisense oligonucleotide
  misc_feature (1)..(1): n is 2'-O-methylcytidine
  misc_feature (2)..(2): n is 2'-O-methyluridine
  misc_feature (3)..(3): n is 2'-O-methylcytidine
  misc_feature (4)..(4): n is 2'-O-methylcytidine
  misc_feature (5)..(5): n is 2'-O-methyladenosine
  misc_feature (6)..(6): n is 2'-O-methyladenosine
  misc_feature (7)..(7): n is 2'-O-methylcytidine
  misc_feature (8)..(8): n is 2'-O-methyladenosine
  misc_feature (9)..(9): n is 2'-O-methyluridine
  misc_feature (10)..(10): n is 2'-O-methylcytidine
  misc_feature (11)..(11): n is 2'-O-methyladenosine
  misc_feature (12)..(12): n is 2'-O-methyladenosine
  misc_feature (13)..(13): n is 2'-O-methylguanosine
  misc_feature (14)..(14): n is 2'-O-methylguanosine
  misc_feature (15)..(15): n is 2'-O-methyladenosine
  misc_feature (16)..(16): n is 2'-O-methyladenosine
  misc_feature (17)..(17): n is 2'-O-methylguanosine
  misc_feature (18)..(18): n is 2'-O-methyladenosine
  misc_feature (19)..(19): n is 2'-O-methyluridine
  misc_feature (20)..(20): n is 2'-O-methylguanosine
  misc_feature (21)..(21): n is 2'-O-methylguanosine
  misc_feature (22)..(22): n is 2'-O-methylcytidine
  misc_feature (23)..(23): n is 2'-O-methyladenosine
  misc_feature (24)..(24): n is 2'-O-methyluridine
  misc_feature (25)..(25): n is 2'-O-methyluridine
  misc_feature (26)..(26): n is 2'-O-methyluridine
  misc_feature (27)..(27): n is 2'-O-methylcytidine
  misc_feature (28)..(28): n is 2'-O-methyluridine
  misc_feature (29)..(29): n is 2'-O-methyladenosine
  misc_feature (30)..(30): n is 2'-O-methylguanosine
nnnnnnnnnnnnnnnnnnnnnnnnnnnnnn

SEQ ID NO: 1608 - RNA, 20 nt, Artificial Sequence
  Antisense oligonucleotide
  misc_feature (1)..(2): BNA scaffold modification
  misc_feature (20)..(20): BNA scaffold modification
tcagcuucuguuagccacug

SEQ ID NO: 1609 - RNA, 20 nt, Artificial Sequence
  Antisense oligonucleotide
  misc_feature (1)..(1): BNA scaffold modification
  misc_feature (4)..(4): BNA scaffold modification
  misc_feature (20)..(20): BNA scaffold modification
tcagcuucuguuagccacug

SEQ ID NO: 1610 - RNA, 20 nt, Artificial Sequence
  Antisense oligonucleotide
  misc_feature (1)..(1): BNA scaffold modification
  misc_feature (5)..(5): BNA scaffold modification
  misc_feature (20)..(20): BNA scaffold modification
tcagcuucuguuagccacug

SEQ ID NO: 1611 - RNA, 20 nt, Artificial Sequence
  Antisense oligonucleotide
  misc_feature (1)..(1): BNA scaffold modification
  misc_feature (8)..(8): BNA scaffold modification
  misc_feature (20)..(20): BNA scaffold modification
tcagcuucuguuagccacug

SEQ ID NO: 1612 - RNA, 20 nt, Artificial Sequence
  Antisense oligonucleotide
  misc_feature (1)..(1): BNA scaffold modification
  misc_feature (10)..(10): BNA scaffold modification
  misc_feature (20)..(20): BNA scaffold modification
tcagcuucuguuagccacug

SEQ ID NO: 1613 - RNA, 20 nt, Artificial Sequence
  Antisense oligonucleotide
  misc_feature (1)..(2): BNA scaffold modification
  misc_feature (19)..(20): BNA scaffold modification
tcagcuucuguuagccactg

SEQ ID NO: 1614 - RNA, 20 nt, Artificial Sequence
  Antisense oligonucleotide
  misc_feature (1)..(1): BNA scaffold modification
  misc_feature (10)..(10): BNA scaffold modification
  misc_feature (19)..(20): BNA scaffold modification
tcagcuucuguuagccactg

SEQ ID NO: 1615 - RNA, 20 nt, Artificial Sequence
  Antisense oligonucleotide
  misc_feature (1)..(1): BNA scaffold modification
  misc_feature (18)..(18): BNA scaffold modification
  misc_feature (20)..(20): BNA scaffold modification
tcagcuucuguuagccacug

SEQ ID NO: 1616 - RNA, 20 nt, Artificial Sequence
  Antisense oligonucleotide
  misc_feature (1)..(1): BNA scaffold modification
  misc_feature (4)..(4): BNA scaffold modification
  misc_feature (10)..(10): BNA scaffold modification
  misc_feature (19)..(20): BNA scaffold modification
tcagcuucuguuagccactg

SEQ ID NO: 1617 - RNA, 20 nt, Artificial Sequence
  Antisense oligonucleotide
  misc_feature (1)..(1): BNA scaffold modification
  misc_feature (4)..(4): BNA scaffold modification
  misc_feature (8)..(8): BNA scaffold modification
  misc_feature (10)..(10): BNA scaffold modification
  misc_feature (20)..(20): BNA scaffold modification
tcagcuucuguuagccacug

SEQ ID NO: 1618 - RNA, 18 nt, Artificial Sequence
  Antisense oligonucleotide
  misc_feature (1)..(1): BNA scaffold modification
  misc_feature (17)..(18): BNA scaffold modification
tcagcuucuguuagccac

SEQ ID NO: 1619 - RNA, 18 nt, Artificial Sequence
  Antisense oligonucleotide
  misc_feature (1)..(2): BNA scaffold modification
  misc_feature (18)..(18): BNA scaffold modification
tcagcuucuguuagccac

SEQ ID NO: 1620 - RNA, 18 nt, Artificial Sequence
  Antisense oligonucleotide
  misc_feature (1)..(1): BNA scaffold modification
  misc_feature (4)..(4): BNA scaffold modification
  misc_feature (18)..(18): BNA scaffold modification
tcagcuucuguuagccac

SEQ ID NO: 1621 - RNA, 18 nt, Artificial Sequence
  Antisense oligonucleotide
  misc_feature (1)..(1): BNA scaffold modification
  misc_feature (8)..(8): BNA scaffold modification
  misc_feature (18)..(18): BNA scaffold modification
tcagcuucuguuagccac

SEQ ID NO: 1622 - RNA, 18 nt, Artificial Sequence
  Antisense oligonucleotide
  misc_feature (1)..(1): BNA scaffold modification
  misc_feature (10)..(10): BNA scaffold modification
  misc_feature (18)..(18): BNA scaffold modification
tcagcuucuguuagccac

SEQ ID NO: 1623 - RNA, 18 nt, Artificial Sequence
  Antisense oligonucleotide
  misc_feature (1)..(2): BNA scaffold modification
  misc_feature (17)..(18): BNA scaffold modification
tcagcuucuguuagccac

SEQ ID NO: 1624 - RNA, 18 nt, Artificial Sequence
  Antisense oligonucleotide
  misc_feature (1)..(1): BNA scaffold modification
  misc_feature (10)..(10): BNA scaffold modification
  misc_feature (17)..(18): BNA scaffold modification
tcagcuucuguuagccac

SEQ ID NO: 1625 - RNA, 18 nt, Artificial Sequence
  Antisense oligonucleotide
  misc_feature (1)..(1): BNA scaffold modification
  misc_feature (5)..(5): BNA scaffold modification
  misc_feature (14)..(14): BNA scaffold modification
  misc_feature (18)..(18): BNA scaffold modification
tcagcuucuguuagccac

SEQ ID NO: 1626 - RNA, 18 nt, Artificial Sequence
  Antisense oligonucleotide
  misc_feature (1)..(1): BNA scaffold modification
  misc_feature (5)..(5): BNA scaffold modification
  misc_feature (10)..(10): BNA scaffold modification
  misc_feature (14)..(14): BNA scaffold modification
  misc_feature (18)..(18): BNA scaffold modification
tcagcuucuguuagccac

SEQ ID NO: 1627 - RNA, 18 nt, Artificial Sequence
  Antisense oligonucleotide
  misc_feature (1)..(1): BNA scaffold modification
  misc_feature (17)..(18): BNA scaffold modification
cagcuucuguuagccact

SEQ ID NO: 1628 - RNA, 18 nt, Artificial Sequence
  Antisense oligonucleotide
  misc_feature (1)..(1): BNA scaffold modification
  misc_feature (4)..(4): BNA scaffold modification
  misc_feature (18)..(18): BNA scaffold modification
cagcuucuguuagccact

SEQ ID NO: 1629 - RNA, 18 nt, Artificial Sequence
  Antisense oligonucleotide
  misc_feature (1)..(1): BNA scaffold modification
  misc_feature (7)..(7): BNA scaffold modification
  misc_feature (18)..(18): BNA scaffold modification
cagcuucuguuagccact

SEQ ID NO: 1630 - RNA, 18 nt, Artificial Sequence
  Antisense oligonucleotide
  misc_feature (1)..(1): BNA scaffold modification
  misc_feature (9)..(9): BNA scaffold modification
  misc_feature (18)..(18): BNA scaffold modification
cagcuucuguuagccact

SEQ ID NO: 1631 - RNA, 18 nt, Artificial Sequence
  Antisense oligonucleotide
  misc_feature (1)..(1): BNA scaffold modification
  misc_feature (13)..(13): BNA scaffold modification
  misc_feature (18)..(18): BNA scaffold modification
cagcuucuguuagccact

SEQ ID NO: 1632 - RNA, 18 nt, Artificial Sequence
  Antisense oligonucleotide
  misc_feature (1)..(1): BNA scaffold modification
  misc_feature (15)..(15): BNA scaffold modification
  misc_feature (18)..(18): BNA scaffold modification
cagcuucuguuagccact

SEQ ID NO: 1633 - RNA, 18 nt, Artificial Sequence
  Antisense oligonucleotide
  misc_feature (1)..(1): BNA scaffold modification
  misc_feature (7)..(7): BNA scaffold modification
  misc_feature (17)..(18): BNA scaffold modification
cagcuucuguuagccact

SEQ ID NO: 1634 - RNA, 18 nt, Artificial Sequence
  Antisense oligonucleotide
  misc_feature (1)..(1): BNA scaffold modification
  misc_feature (4)..(4): BNA scaffold modification
  misc_feature (14)..(14): BNA scaffold modification
  misc_feature (18)..(18): BNA scaffold modification
cagcuucuguuagccact

SEQ ID NO: 1635 - RNA, 18 nt, Artificial Sequence
  Antisense oligonucleotide
  misc_feature (1)..(1): BNA scaffold modification
  misc_feature (4)..(4): BNA scaffold modification
  misc_feature (9)..(9): BNA scaffold modification
  misc_feature (14)..(14): BNA scaffold modification
  misc_feature (18)..(18): BNA scaffold modification
cagcuucuguuagccact

SEQ ID NO: 1636 - RNA, 18 nt, Artificial Sequence
  Antisense oligonucleotide
  misc_feature (1)..(1): BNA scaffold modification
  misc_feature (18)..(18): BNA scaffold modification
agcuucuguuagccacug

SEQ ID NO: 1637 - RNA, 18 nt, Artificial Sequence
  Antisense oligonucleotide
  misc_feature (1)..(1): BNA scaffold modification
  misc_feature (3)..(3): BNA scaffold modification
  misc_feature (18)..(18): BNA scaffold modification
agcuucuguuagccacug

SEQ ID NO: 1638 - RNA, 18 nt, Artificial Sequence
  Antisense oligonucleotide
  misc_feature (1)..(1): BNA scaffold modification
  misc_feature (6)..(6): BNA scaffold modification
  misc_feature (18)..(18): BNA scaffold modification
agcuucuguuagccacug

SEQ ID NO: 1639 - RNA, 18 nt, Artificial Sequence
  Antisense oligonucleotide
  misc_feature (1)..(1): BNA scaffold modification
  misc_feature (8)..(8): BNA scaffold modification
  misc_feature (18)..(18): BNA scaffold modification
agcuucuguuagccacug

SEQ ID NO: 1640 - RNA, 18 nt, Artificial Sequence
  Antisense oligonucleotide
  misc_feature (1)..(1): BNA scaffold modification
  misc_feature (12)..(12): BNA scaffold modification
  misc_feature (18)..(18): BNA scaffold modification
agcuucuguuagccacug

SEQ ID NO: 1641 - RNA, 18 nt, Artificial Sequence
  Antisense oligonucleotide
  misc_feature (1)..(1): BNA scaffold modification
  misc_feature (14)..(14): BNA scaffold modification
  misc_feature (18)..(18): BNA scaffold modification
agcuucuguuagccacug

SEQ ID NO: 1642 - RNA, 18 nt, Artificial Sequence
  Antisense oligonucleotide
  misc_feature (1)..(1): BNA scaffold modification
  misc_feature (16)..(16): BNA scaffold modification
  misc_feature (18)..(18): BNA scaffold modification
agcuucuguuagccacug

SEQ ID NO: 1643 - RNA, 18 nt, Artificial Sequence
  Antisense oligonucleotide
  misc_feature (1)..(2): BNA scaffold modification
  misc_feature (17)..(18): BNA scaffold modification
agcuucuguuagccactg

SEQ ID NO: 1644 - RNA, 18 nt, Artificial Sequence
  Antisense oligonucleotide
  misc_feature (1)..(1): BNA scaffold modification
  misc_feature (6)..(6): BNA scaffold modification
  misc_feature (13)..(13): BNA scaffold modification
  misc_feature (18)..(18): BNA scaffold modification
agcuucuguuagccacug

SEQ ID NO: 1645 - RNA, 18 nt, Artificial Sequence
  Antisense oligonucleotide
  misc_feature (1)..(1): BNA scaffold modification
  misc_feature (6)..(6): BNA scaffold modification
  misc_feature (8)..(8): BNA scaffold modification
  misc_feature (13)..(13): BNA scaffold modification
  misc_feature (18)..(18): BNA scaffold modification
agcuucuguuagccacug

SEQ ID NO: 1646 - RNA, 16 nt, Artificial Sequence
  Antisense oligonucleotide
  misc_feature (1)..(1): BNA scaffold modification
  misc_feature (16)..(16): BNA scaffold modification
tcagcuucuguuagcc

SEQ ID NO: 1647 - RNA, 16 nt, Artificial Sequence
  Antisense oligonucleotide
  misc_feature (1)..(1): BNA scaffold modification
  misc_feature (4)..(4): BNA scaffold modification
  misc_feature (16)..(16): BNA scaffold modification
tcagcuucuguuagcc

SEQ ID NO: 1648 - RNA, 16 nt, Artificial Sequence
  Antisense oligonucleotide
  misc_feature (1)..(1): BNA scaffold modification
  misc_feature (8)..(8): BNA scaffold modification
  misc_feature (16)..(16): BNA scaffold modification
tcagcuucuguuagcc

SEQ ID NO: 1649 - RNA, 16 nt, Artificial Sequence
  Antisense oligonucleotide
  misc_feature (1)..(1): BNA scaffold modification
  misc_feature (10)..(10): BNA scaffold modification
  misc_feature (16)..(16): BNA scaffold modification
tcagcuucuguuagcc

SEQ ID NO: 1650 - RNA, 16 nt, Artificial Sequence
  Antisense oligonucleotide
  misc_feature (1)..(1): BNA scaffold modification
  misc_feature (14)..(14): BNA scaffold modification
  misc_feature (16)..(16): BNA scaffold modification
tcagcuucuguuagcc

SEQ ID NO: 1651 - RNA, 16 nt, Artificial Sequence
  Antisense oligonucleotide
  misc_feature (1)..(2): BNA scaffold modification
  misc_feature (10)..(10): BNA scaffold modification
  misc_feature (16)..(16): BNA scaffold modification
tcagcuucuguuagcc

SEQ ID NO: 1652 - RNA, 16 nt, Artificial Sequence
  Antisense oligonucleotide
  misc_feature (1)..(2): BNA scaffold modification
  misc_feature (15)..(16): BNA scaffold modification
tcagcuucuguuagcc

SEQ ID NO: 1653 - RNA, 16 nt, Artificial Sequence
  Antisense oligonucleotide
  misc_feature (1)..(1): BNA scaffold modification
  misc_feature (4)..(4): BNA scaffold modification
  misc_feature (10)..(10): BNA scaffold modification
  misc_feature (16)..(16): BNA scaffold modification
tcagcuucuguuagcc

SEQ ID NO: 1654 - RNA, 16 nt, Artificial Sequence
  Antisense oligonucleotide
  misc_feature (1)..(1): BNA scaffold modification
  misc_feature (4)..(4): BNA scaffold modification
  misc_feature (10)..(10): BNA scaffold modification
  misc_feature (14)..(14): BNA scaffold modification
  misc_feature (16)..(16): BNA scaffold modification
tcagcuucuguuagcc

SEQ ID NO: 1655 - RNA, 16 nt, Artificial Sequence
  Antisense oligonucleotide
  misc_feature (1)..(2): BNA scaffold modification
  misc_feature (8)..(8): BNA scaffold modification
  misc_feature (15)..(16): BNA scaffold modification
tcagcuucuguuagcc

SEQ ID NO: 1656 - RNA, 16 nt, Artificial Sequence
  Antisense oligonucleotide
  misc_feature (1)..(1): BNA scaffold modification
  misc_feature (16)..(16): BNA scaffold modification
cagcuucuguuagcca

SEQ ID NO: 1657 - RNA, 16 nt, Artificial Sequence
  Antisense oligonucleotide
  misc_feature (1)..(1): BNA scaffold modification
  misc_feature (3)..(3): BNA scaffold modification
  misc_feature (16)..(16): BNA scaffold modification
cagcuucuguuagcca

SEQ ID NO: 1658 - RNA, 16 nt, Artificial Sequence
  Antisense oligonucleotide
  misc_feature (1)..(1): BNA scaffold modification
  misc_feature (7)..(7): BNA scaffold modification
  misc_feature (16)..(16): BNA scaffold modification
cagcuucuguuagcca

SEQ ID NO: 1659 - RNA, 16 nt, Artificial Sequence
  Antisense oligonucleotide
  misc_feature (1)..(1): BNA scaffold modification
  misc_feature (9)..(9): BNA scaffold modification
  misc_feature (16)..(16): BNA scaffold modification
cagcuucuguuagcca

SEQ ID NO: 1660 - RNA, 16 nt, Artificial Sequence
  Antisense oligonucleotide
  misc_feature (1)..(1): BNA scaffold modification
  misc_feature (13)..(13): BNA scaffold modification
  misc_feature (16)..(16): BNA scaffold modification
cagcuucuguuagcca

SEQ ID NO: 1661 - RNA, 16 nt, Artificial Sequence
  Antisense oligonucleotide
  misc_feature (1)..(1): BNA scaffold modification
  misc_feature (3)..(3): BNA scaffold modification
  misc_feature (9)..(9): BNA scaffold modification
  misc_feature (16)..(16): BNA scaffold modification
cagcuucuguuagcca

SEQ ID NO: 1662 - RNA, 16 nt, Artificial Sequence
  Antisense oligonucleotide
  misc_feature (1)..(1): BNA scaffold modification
  misc_feature (3)..(3): BNA scaffold modification
  misc_feature (9)..(9): BNA scaffold modification
  misc_feature (13)..(13): BNA scaffold modification
  misc_feature (16)..(16): BNA scaffold modification
cagcuucuguuagcca

SEQ ID NO: 1663 - RNA, 16 nt, Artificial Sequence
  Antisense oligonucleotide
  misc_feature (1)..(1): BNA scaffold modification
  misc_feature (4)..(4): BNA scaffold modification
  misc_feature (14)..(14): BNA scaffold modification
  misc_feature (16)..(16): BNA scaffold modification
cagcuucuguuagcca

SEQ ID NO: 1664 - RNA, 16 nt, Artificial Sequence
  Antisense oligonucleotide
  misc_feature (1)..(1): BNA scaffold modification
  misc_feature (4)..(4): BNA scaffold modification
  misc_feature (7)..(7): BNA scaffold modification
  misc_feature (14)..(14): BNA scaffold modification
  misc_feature (16)..(16): BNA scaffold modification
cagcuucuguuagcca

SEQ ID NO: 1665 - RNA, 16 nt, Artificial Sequence
  Antisense oligonucleotide
  misc_feature (1)..(1): BNA scaffold modification
  misc_feature (7)..(7): BNA scaffold modification
  misc_feature (9)..(9): BNA scaffold modification
  misc_feature (16)..(16): BNA scaffold modification
cagcuucuguuagcca

SEQ ID NO: 1666 - RNA, 16 nt, Artificial Sequence
  Antisense oligonucleotide
  misc_feature (1)..(1): BNA scaffold modification
  misc_feature (16)..(16): BNA scaffold modification
agcuucuguuagccac

SEQ ID NO: 1667 - RNA, 16 nt, Artificial Sequence
  Antisense oligonucleotide
  misc_feature (1)..(2): BNA scaffold modification
  misc_feature (16)..(16): BNA scaffold modification
agcuucuguuagccac

SEQ ID NO: 1668 - RNA, 16 nt, Artificial Sequence
  Antisense oligonucleotide
  misc_feature (1)..(1): BNA scaffold modification
  misc_feature (3)..(3): BNA scaffold modification
  misc_feature (16)..(16): BNA scaffold modification
agcuucuguuagccac

SEQ ID NO: 1669 - RNA, 16 nt, Artificial Sequence
  Antisense oligonucleotide
  misc_feature (1)..(1): BNA scaffold modification
  misc_feature (6)..(6): BNA scaffold modification
  misc_feature (16)..(16): BNA scaffold modification
agcuucuguuagccac

SEQ ID NO: 1670 - RNA, 16 nt, Artificial Sequence
  Antisense oligonucleotide
  misc_feature (1)..(1): BNA scaffold modification
  misc_feature (8)..(8): BNA scaffold modification
  misc_feature (16)..(16): BNA scaffold modification
agcuucuguuagccac

SEQ ID NO: 1671 - RNA, 16 nt, Artificial Sequence
  Antisense oligonucleotide
  misc_feature (1)..(1): BNA scaffold modification
  misc_feature (12)..(12): BNA scaffold modification
  misc_feature (16)..(16): BNA scaffold modification
agcuucuguuagccac

SEQ ID NO: 1672 - RNA, 16 nt, Artificial Sequence
  Antisense oligonucleotide
  misc_feature (1)..(1): BNA scaffold modification
  misc_feature (14)..(14): BNA scaffold modification
  misc_feature (16)..(16): BNA scaffold modification
agcuucuguuagccac

SEQ ID NO: 1673 - RNA, 16 nt, Artificial Sequence
  Antisense oligonucleotide
  misc_feature (1)..(1): BNA scaffold modification
  misc_feature (6)..(6): BNA scaffold modification
  misc_feature (12)..(12): BNA scaffold modification
  misc_feature (16)..(16): BNA scaffold modification
agcuucuguuagccac

SEQ ID NO: 1674 - RNA, 16 nt, Artificial Sequence
  Antisense oligonucleotide
  misc_feature (1)..(1): BNA scaffold modification
  misc_feature (8)..(8): BNA scaffold modification
  misc_feature (12)..(12): BNA scaffold modification
  misc_feature (16)..(16): BNA scaffold modification
agcuucuguuagccac

SEQ ID NO: 1675 - RNA, 16 nt, Artificial Sequence
  Antisense oligonucleotide
  misc_feature (1)..(1): BNA scaffold modification
  misc_feature (6)..(6): BNA scaffold modification
  misc_feature (8)..(8): BNA scaffold modification
  misc_feature (12)..(12): BNA scaffold modification
  misc_feature (16)..(16): BNA scaffold modification
agcuucuguuagccac

SEQ ID NO: 1676 - RNA, 16 nt, Artificial Sequence
  Antisense oligonucleotide
  misc_feature (1)..(1): BNA scaffold modification
  misc_feature (16)..(16): BNA scaffold modification
gcuucuguuagccact

SEQ ID NO: 1677 - RNA, 16 nt, Artificial Sequence
  Antisense oligonucleotide
  misc_feature (1)..(1): BNA scaffold modification
  misc_feature (5)..(5): BNA scaffold modification
  misc_feature (16)..(16): BNA scaffold modification
gcuucuguuagccact

SEQ ID NO: 1678 - RNA, 16 nt, Artificial Sequence
  Antisense oligonucleotide
  misc_feature (1)..(1): BNA scaffold modification
  misc_feature (7)..(7): BNA scaffold modification
  misc_feature (16)..(16): BNA scaffold modification
gcuucuguuagccact

SEQ ID NO: 1679 - RNA, 16 nt, Artificial Sequence
  Antisense oligonucleotide
  misc_feature (1)..(1): BNA scaffold modification
  misc_feature (11)..(11): BNA scaffold modification
  misc_feature (16)..(16): BNA scaffold modification
gcuucuguuagccact

SEQ ID NO: 1680 - RNA, 16 nt, Artificial Sequence
  Antisense oligonucleotide
  misc_feature (1)..(1): BNA scaffold modification
  misc_feature (13)..(13): BNA scaffold modification
  misc_feature (16)..(16): BNA scaffold modification
gcuucuguuagccact

SEQ ID NO: 1681 - RNA, 16 nt, Artificial Sequence
  Antisense oligonucleotide
  misc_feature (1)..(1): BNA scaffold modification
  misc_feature (15)..(16): BNA scaffold modification
gcuucuguuagccact

SEQ ID NO: 1682 - RNA, 16 nt, Artificial Sequence
  Antisense oligonucleotide
  misc_feature (1)..(2): BNA scaffold modification
  misc_feature (16)..(16): BNA scaffold modification
gcuucuguuagccact

SEQ ID NO: 1683 - RNA, 16 nt, Artificial Sequence
  Antisense oligonucleotide
  misc_feature (1)..(1): BNA scaffold modification
  misc_feature (5)..(5): BNA scaffold modification
  misc_feature (11)..(11): BNA scaffold modification
  misc_feature (16)..(16): BNA scaffold modification
gcuucuguuagccact

SEQ ID NO: 1684 - RNA, 16 nt, Artificial Sequence
  Antisense oligonucleotide
  misc_feature (1)..(1): BNA scaffold modification
  misc_feature (7)..(7): BNA scaffold modification
  misc_feature (11)..(11): BNA scaffold modification
  misc_feature (16)..(16): BNA scaffold modification
gcuucuguuagccact

SEQ ID NO: 1685 - RNA, 16 nt, Artificial Sequence
  Antisense oligonucleotide
  misc_feature (1)..(2): BNA scaffold modification
  misc_feature (15)..(16): BNA scaffold modification
gcuucuguuagccact

SEQ ID NO: 1686 - RNA, 16 nt, Artificial Sequence
  Antisense oligonucleotide
  misc_feature (1)..(2): BNA scaffold modification
  misc_feature (7)..(7): BNA scaffold modification
  misc_feature (15)..(16): BNA scaffold modification
gcuucuguuagccact

SEQ ID NO: 1687 - RNA, 16 nt, Artificial Sequence
  Antisense oligonucleotide
  misc_feature (1)..(1): BNA scaffold modification
  misc_feature (16)..(16): BNA scaffold modification
cuucuguuagccacug

SEQ ID NO: 1688 - RNA, 16 nt, Artificial Sequence
  Antisense oligonucleotide
  misc_feature (1)..(1): BNA scaffold modification
  misc_feature (4)..(4): BNA scaffold modification
  misc_feature (16)..(16): BNA scaffold modification
cuucuguuagccacug

SEQ ID NO: 1689 - RNA, 16 nt, Artificial Sequence
  Antisense oligonucleotide
  misc_feature (1)..(1): BNA scaffold modification
  misc_feature (6)..(6): BNA scaffold modification
  misc_feature (16)..(16): BNA scaffold modification
cuucuguuagccacug

SEQ ID NO: 1690 - RNA, 16 nt, Artificial Sequence
  Antisense oligonucleotide
  misc_feature (1)..(1): BNA scaffold modification
  misc_feature (10)..(10): BNA scaffold modification
  misc_feature (16)..(16): BNA scaffold modification
cuucuguuagccacug

SEQ ID NO: 1691 - RNA, 16 nt, Artificial Sequence
  Antisense oligonucleotide
  misc_feature (1)..(1): BNA scaffold modification
  misc_feature (12)..(12): BNA scaffold modification
  misc_feature (16)..(16): BNA scaffold modification
cuucuguuagccacug

SEQ ID NO: 1692 - RNA, 16 nt, Artificial Sequence
  Antisense oligonucleotide
  misc_feature (1)..(1): BNA scaffold modification
  misc_feature (14)..(14): BNA scaffold modification
  misc_feature (16)..(16): BNA scaffold modification
cuucuguuagccacug

SEQ ID NO: 1693 - RNA, 16 nt, Artificial Sequence
  Antisense oligonucleotide
  misc_feature (1)..(1): BNA scaffold modification
  misc_feature (4)..(4): BNA scaffold modification
  misc_feature (12)..(12): BNA scaffold modification
  misc_feature (16)..(16): BNA scaffold modification
cuucuguuagccacug

SEQ ID NO: 1694 - RNA, 16 nt, Artificial Sequence
  Antisense oligonucleotide
  misc_feature (1)..(1): BNA scaffold modification
  misc_feature (6)..(6): BNA scaffold modification
  misc_feature (10)..(10): BNA scaffold modification
  misc_feature (16)..(16): BNA scaffold modification
cuucuguuagccacug

SEQ ID NO: 1695 - RNA, 16 nt, Artificial Sequence
  Antisense oligonucleotide
  misc_feature (1)..(1): BNA scaffold modification
  misc_feature (4)..(4): BNA scaffold modification
  misc_feature (6)..(6): BNA scaffold modification
  misc_feature (10)..(10): BNA scaffold modification
  misc_feature (14)..(14): BNA scaffold modification
  misc_feature (16)..(16): BNA scaffold modification
cuucuguuagccacug

SEQ ID NO: 1696 - RNA, 23 nt, Artificial Sequence
  Antisense oligonucleotide
  misc_feature (1)..(1): BNA scaffold modification
  misc_feature (7)..(7): BNA scaffold modification
  misc_feature (23)..(23): BNA scaffold modification
ccauuuguauuuagcauguuccc

SEQ ID NO: 1697 - RNA, 23 nt, Artificial Sequence
  Antisense oligonucleotide
  misc_feature (1)..(1): BNA scaffold modification
  misc_feature (14)..(14): BNA scaffold modification
  misc_feature (23)..(23): BNA scaffold modification
ccauuuguauuuagcauguuccc

SEQ ID NO: 1698 - RNA, 23 nt, Artificial Sequence
  Antisense oligonucleotide
  misc_feature (1)..(1): BNA scaffold modification
  misc_feature (18)..(18): BNA scaffold modification
  misc_feature (23)..(23): BNA scaffold modification
ccauuuguauuuagcauguuccc

SEQ ID NO: 1699 - RNA, 23 nt, Artificial Sequence
  Antisense oligonucleotide
  misc_feature (1)..(1): BNA scaffold modification
  misc_feature (22)..(23): BNA scaffold modification
ccauuuguauuuagcauguuccc

SEQ ID NO: 1700 - RNA, 23 nt, Artificial Sequence
  Antisense oligonucleotide
  misc_feature (1)..(1): BNA scaffold modification
  misc_feature (7)..(7): BNA scaffold modification
  misc_feature (14)..(14): BNA scaffold modification
  misc_feature (23)..(23): BNA scaffold modification
ccauuuguauuuagcauguuccc

SEQ ID NO: 1701 - RNA, 23 nt, Artificial Sequence
  Antisense oligonucleotide
  misc_feature (1)..(2): BNA scaffold modification
  misc_feature (15)..(15): BNA scaffold modification
  misc_feature (22)..(23): BNA scaffold modification
ccauuuguauuuagcauguuccc

SEQ ID NO: 1702 - RNA, 23 nt, Artificial Sequence
  Antisense oligonucleotide
  misc_feature (1)..(1): BNA scaffold modification
  misc_feature (7)..(7): BNA scaffold modification
  misc_feature (14)..(14): BNA scaffold modification
  misc_feature (18)..(18): BNA scaffold modification
  misc_feature (23)..(23): BNA scaffold modification
ccauuuguauuuagcauguuccc

SEQ ID NO: 1703 - RNA, 20 nt, Artificial Sequence
  Antisense oligonucleotide
  misc_feature (1)..(1): BNA scaffold modification
  misc_feature (20)..(20): BNA scaffold modification
ccauuuguauuuagcaugut

SEQ ID NO: 1704 - RNA, 20 nt, Artificial Sequence
  Antisense oligonucleotide
  misc_feature (1)..(1): BNA scaffold modification
  misc_feature (7)..(7): BNA scaffold modification
  misc_feature (20)..(20): BNA scaffold modification
ccauuuguauuuagcaugut

SEQ ID NO: 1705 - RNA, 20 nt, Artificial Sequence
  Antisense oligonucleotide
  misc_feature (1)..(1): BNA scaffold modification
  misc_feature (14)..(14): BNA scaffold modification
  misc_feature (20)..(20): BNA scaffold modification
ccauuuguauuuagcaugut

SEQ ID NO: 1706 - RNA, 20 nt, Artificial Sequence
  Antisense oligonucleotide
  misc_feature (1)..(1): BNA scaffold modification
  misc_feature (18)..(18): BNA scaffold modification
  misc_feature (20)..(20): BNA scaffold modification
ccauuuguauuuagcaugut

SEQ ID NO: 1707 - RNA, 20 nt, Artificial Sequence
  Antisense oligonucleotide
  misc_feature (1)..(1): BNA scaffold modification
  misc_feature (7)..(7): BNA scaffold modification
  misc_feature (14)..(14): BNA scaffold modification
  misc_feature (20)..(20): BNA scaffold modification
ccauuuguauuuagcaugut

SEQ ID NO: 1708 - RNA, 20 nt, Artificial Sequence
  Antisense oligonucleotide
  misc_feature (1)..(2): BNA scaffold modification
  misc_feature (19)..(20): BNA scaffold modification
ccauuuguauuuagcaugtt

SEQ ID NO: 1709 - RNA, 20 nt, Artificial Sequence
  Antisense oligonucleotide
  misc_feature (1)..(1): BNA scaffold modification
  misc_feature (7)..(7): BNA scaffold modification
  misc_feature (14)..(14): BNA scaffold modification
  misc_feature (18)..(18): BNA scaffold modification
  misc_feature (20)..(20): BNA scaffold modification
ccauuuguauuuagcaugut

SEQ ID NO: 1710 - RNA, 20 nt, Artificial Sequence
  Antisense oligonucleotide
  misc_feature (1)..(1): BNA scaffold modification
  misc_feature (20)..(20): BNA scaffold modification
cauuuguauuuagcauguuc

SEQ ID NO: 1711 - RNA, 20 nt, Artificial Sequence
  Antisense oligonucleotide
  misc_feature (1)..(1): BNA scaffold modification
  misc_feature (6)..(6): BNA scaffold modification
  misc_feature (20)..(20): BNA scaffold modification
cauuuguauuuagcauguuc

SEQ ID NO: 1712 - RNA, 20 nt, Artificial Sequence
  Antisense oligonucleotide
  misc_feature (1)..(1): BNA scaffold modification
  misc_feature (13)..(13): BNA scaffold modification
  misc_feature (20)..(20): BNA scaffold modification
cauuuguauuuagcauguuc

SEQ ID NO: 1713 - RNA, 20 nt, Artificial Sequence
  Antisense oligonucleotide
  misc_feature (1)..(1): BNA scaffold modification
  misc_feature (17)..(17): BNA scaffold modification
  misc_feature (20)..(20): BNA scaffold modification
cauuuguauuuagcauguuc

SEQ ID NO: 1714 - RNA, 20 nt, Artificial Sequence
  Antisense oligonucleotide
  misc_feature (1)..(1): BNA scaffold modification
  misc_feature (6)..(6): BNA scaffold modification
  misc_feature (13)..(13): BNA scaffold modification
  misc_feature (20)..(20): BNA scaffold modification
cauuuguauuuagcauguuc

SEQ ID NO: 1715 - RNA, 20 nt, Artificial Sequence
  Antisense oligonucleotide
  misc_feature (1)..(1): BNA scaffold modification
  misc_feature (6)..(6): BNA scaffold modification
  misc_feature (13)..(13): BNA scaffold modification
  misc_feature (17)..(17): BNA scaffold modification
  misc_feature (20)..(20): BNA scaffold modification
cauuuguauuuagcauguuc

SEQ ID NO: 1716 - RNA, 20 nt, Artificial Sequence
  Antisense oligonucleotide
  misc_feature (1)..(2): BNA scaffold modification
  misc_feature (6)..(6): BNA scaffold modification
  misc_feature (13)..(13): BNA scaffold modification
  misc_feature (19)..(20): BNA scaffold modification
cauuuguauuuagcaugutc

SEQ ID NO: 1717 - RNA, 20 nt, Artificial Sequence
  Antisense oligonucleotide
  misc_feature (1)..(1): BNA scaffold modification
  misc_feature (20)..(20): BNA scaffold modification
auuuguauuuagcauguucc

SEQ ID NO: 1718 - RNA, 20 nt, Artificial Sequence
  Antisense oligonucleotide
  misc_feature (1)..(1): BNA scaffold modification
  misc_feature (5)..(5): BNA scaffold modification
  misc_feature (20)..(20): BNA scaffold modification
auuuguauuuagcauguucc

SEQ ID NO: 1719 - RNA, 20 nt, Artificial Sequence
  Antisense oligonucleotide
  misc_feature (1)..(1): BNA scaffold modification
  misc_feature (12)..(12): BNA scaffold modification
  misc_feature (20)..(20): BNA scaffold modification
auuuguauuuagcauguucc

SEQ ID NO: 1720 - RNA, 20 nt, Artificial Sequence
  Antisense oligonucleotide
  misc_feature (1)..(1): BNA scaffold modification
  misc_feature (16)..(16): BNA scaffold modification
  misc_feature (20)..(20): BNA scaffold modification
auuuguauuuagcauguucc

SEQ ID NO: 1721 - RNA, 20 nt, Artificial Sequence
  Antisense oligonucleotide
  misc_feature (1)..(1): BNA scaffold modification
  misc_feature (5)..(5): BNA scaffold modification
  misc_feature (12)..(12): BNA scaffold modification
  misc_feature (20)..(20): BNA scaffold modification
auuuguauuuagcauguucc

SEQ ID NO: 1722 - RNA, 20 nt, Artificial Sequence
  Antisense oligonucleotide
  misc_feature (1)..(1): BNA scaffold modification
  misc_feature (5)..(5): BNA scaffold modification
  misc_feature (16)..(16): BNA scaffold modification
  misc_feature (20)..(20): BNA scaffold modification
auuuguauuuagcauguucc

SEQ ID NO: 1723 - RNA, 20 nt, Artificial Sequence
  Antisense oligonucleotide
  misc_feature (1)..(2): BNA scaffold modification
  misc_feature (13)..(13): BNA scaffold modification
  misc_feature (19)..(20): BNA scaffold modification
atuuguauuuagcauguucc

SEQ ID NO: 1724 - RNA, 20 nt, Artificial Sequence
  Antisense oligonucleotide
  misc_feature (1)..(1): BNA scaffold modification
  misc_feature (20)..(20): BNA scaffold modification
tuuguauuuagcauguuccc

SEQ ID NO: 1725 - RNA, 20 nt, Artificial Sequence
  Antisense oligonucleotide
  misc_feature (1)..(1): BNA scaffold modification
  misc_feature (4)..(4): BNA scaffold modification
  misc_feature (20)..(20): BNA scaffold modification
tuuguauuuagcauguuccc

SEQ ID NO: 1726 - RNA, 20 nt, Artificial Sequence
  Antisense oligonucleotide
  misc_feature (1)..(1): BNA scaffold modification
  misc_feature (11)..(11): BNA scaffold modification
  misc_feature (20)..(20): BNA scaffold modification
tuuguauuuagcauguuccc

SEQ ID NO: 1727 - RNA, 20 nt, Artificial Sequence
  Antisense oligonucleotide
  misc_feature (1)..(1): BNA scaffold modification
  misc_feature (15)..(15): BNA scaffold modification
  misc_feature (20)..(20): BNA scaffold modification
tuuguauuuagcauguuccc

SEQ ID NO: 1728 - RNA, 20 nt, Artificial Sequence
  Antisense oligonucleotide
  misc_feature (1)..(1): BNA scaffold modification
  misc_feature (4)..(4): BNA scaffold modification
  misc_feature (15)..(15): BNA scaffold modification
  misc_feature (20)..(20): BNA scaffold modification
tuuguauuuagcauguuccc

SEQ ID NO: 1729 - RNA, 20 nt, Artificial Sequence
  Antisense oligonucleotide
  misc_feature (1)..(1): BNA scaffold modification
  misc_feature (4)..(4): BNA scaffold modification
  misc_feature (11)..(11): BNA scaffold modification
  misc_feature (20)..(20): BNA scaffold modification
tuuguauuuagcauguuccc

SEQ ID NO: 1730 - RNA, 20 nt, Artificial Sequence
  Antisense oligonucleotide
  misc_feature (1)..(1): BNA scaffold modification
  misc_feature (4)..(4): BNA scaffold modification
  misc_feature (11)..(11): BNA scaffold modification
  misc_feature (15)..(15): BNA scaffold modification
  misc_feature (20)..(20): BNA scaffold modification
tuuguauuuagcauguuccc

SEQ ID NO: 1731 - RNA, 20 nt, Artificial Sequence
  Antisense oligonucleotide
  misc_feature (1)..(2): BNA scaffold modification
  misc_feature (11)..(11): BNA scaffold modification
  misc_feature (19)..(20): BNA scaffold modification
ttuguauuuagcauguuccc

SEQ ID NO: 1732 - RNA, 18 nt, Artificial Sequence
  Antisense oligonucleotide
  misc_feature (1)..(1): BNA scaffold modification
  misc_feature (18)..(18): BNA scaffold modification
ccauuuguauuuagcaug

SEQ ID NO: 1733 - RNA, 18 nt, Artificial Sequence
  Antisense oligonucleotide
  misc_feature (1)..(1): BNA scaffold modification
  misc_feature (7)..(7): BNA scaffold modification
  misc_feature (18)..(18): BNA scaffold modification
ccauuuguauuuagcaug

SEQ ID NO: 1734 - RNA, 18 nt, Artificial Sequence
  Antisense oligonucleotide
  misc_feature (1)..(1): BNA scaffold modification
  misc_feature (14)..(14): BNA scaffold modification
  misc_feature (18)..(18): BNA scaffold modification
ccauuuguauuuagcaug

SEQ ID NO: 1735 - RNA, 18 nt, Artificial Sequence
  Antisense oligonucleotide
  misc_feature (1)..(1): BNA scaffold modification
  misc_feature (7)..(7): BNA scaffold modification
  misc_feature (14)..(14): BNA scaffold modification
  misc_feature (18)..(18): BNA scaffold modification
ccauuuguauuuagcaug

SEQ ID NO: 1736 - RNA, 18 nt, Artificial Sequence
  Antisense oligonucleotide
  misc_feature (1)..(2): BNA scaffold modification
  misc_feature (14)..(15): BNA scaffold modification
  misc_feature (18)..(18): BNA scaffold modification
ccauuuguauuuagcaug

SEQ ID NO: 1737 - RNA, 18 nt, Artificial Sequence
  Antisense oligonucleotide
  misc_feature (1)..(2): BNA scaffold modification
  misc_feature (17)..(18): BNA scaffold modification
ccauuuguauuuagcatg

SEQ ID NO: 1738 - RNA, 18 nt, Artificial Sequence
  Antisense oligonucleotide
  misc_feature (1)..(1): BNA scaffold modification
  misc_feature (7)..(7): BNA scaffold modification
  misc_feature (14)..(15): BNA scaffold modification
  misc_feature (18)..(18): BNA scaffold modification
ccauuuguauuuagcaug

SEQ ID NO: 1739 - RNA, 18 nt, Artificial Sequence
  Antisense oligonucleotide
  misc_feature (1)..(1): BNA scaffold modification
  misc_feature (18)..(18): BNA scaffold modification
cauuuguauuuagcaugt

SEQ ID NO: 1740 - RNA, 18 nt, Artificial Sequence
  Antisense oligonucleotide
  misc_feature (1)..(1): BNA scaffold modification
  misc_feature (6)..(6): BNA scaffold modification
  misc_feature (18)..(18): BNA scaffold modification
cauuuguauuuagcaugt

SEQ ID NO: 1741 - RNA, 18 nt, Artificial Sequence
  Antisense oligonucleotide
  misc_feature (1)..(1): BNA scaffold modification
  misc_feature (13)..(13): BNA scaffold modification
  misc_feature (18)..(18): BNA scaffold modification
cauuuguauuuagcaugt

SEQ ID NO: 1742 - RNA, 18 nt, Artificial Sequence
  Antisense oligonucleotide
  misc_feature (1)..(1): BNA scaffold modification
  misc_feature (6)..(6): BNA scaffold modification
  misc_feature (13)..(13): BNA scaffold modification
  misc_feature (18)..(18): BNA scaffold modification
cauuuguauuuagcaugt

SEQ ID NO: 1743 - RNA, 18 nt, Artificial Sequence
  Antisense oligonucleotide
  misc_feature (1)..(1): BNA scaffold modification
  misc_feature (13)..(14): BNA scaffold modification
  misc_feature (18)..(18): BNA scaffold modification
cauuuguauuuagcaugt

SEQ ID NO: 1744 - RNA, 18 nt, Artificial Sequence
  Antisense oligonucleotide
  misc_feature (1)..(2): BNA scaffold modification
  misc_feature (17)..(18): BNA scaffold modification
cauuuguauuuagcaugt

SEQ ID NO: 1745 - RNA, 18 nt, Artificial Sequence
  Antisense oligonucleotide
  misc_feature (1)..(1): BNA scaffold modification
  misc_feature (6)..(6): BNA scaffold modification
  misc_feature (13)..(14): BNA scaffold modification
  misc_feature (18)..(18): BNA scaffold modification
cauuuguauuuagcaugt

SEQ ID NO: 1746 - RNA, 18 nt, Artificial Sequence
  Antisense oligonucleotide
  misc_feature (1)..(1): BNA scaffold modification
  misc_feature (18)..(18): BNA scaffold modification
auuuguauuuagcaugut

SEQ ID NO: 1747 - RNA, 18 nt, Artificial Sequence
  Antisense oligonucleotide
  misc_feature (1)..(1): BNA scaffold modification
  misc_feature (18)..(18): BNA scaffold modification
auuuguauuuagcaugut

SEQ ID NO: 1748 - RNA, 18 nt, Artificial Sequence
  Antisense oligonucleotide
  misc_feature (1)..(1): BNA scaffold modification
  misc_feature (5)..(5): BNA scaffold modification
  misc_feature (18)..(18): BNA scaffold modification
auuuguauuuagcaugut

SEQ ID NO: 1749 - RNA, 18 nt, Artificial Sequence
  Antisense oligonucleotide
  misc_feature (1)..(1): BNA scaffold modification
  misc_feature (12)..(12): BNA scaffold modification
  misc_feature (18)..(18): BNA scaffold modification
auuuguauuuagcaugut

SEQ ID NO: 1750 - RNA, 18 nt, Artificial Sequence
  Antisense oligonucleotide
  misc_feature (1)..(1): BNA scaffold modification
  misc_feature (5)..(5): BNA scaffold modification
  misc_feature (12)..(12): BNA scaffold modification
  misc_feature (18)..(18): BNA scaffold modification
auuuguauuuagcaugut

SEQ ID NO: 1751 - RNA, 18 nt, Artificial Sequence
  Antisense oligonucleotide
  misc_feature (1)..(2): BNA scaffold modification
  misc_feature (17)..(18): BNA scaffold modification
atuuguauuuagcaugtt

SEQ ID NO: 1752 - RNA, 18 nt, Artificial Sequence
  Antisense oligonucleotide
  misc_feature (1)..(1): BNA scaffold modification
  misc_feature (5)..(5): BNA scaffold modification
  misc_feature (12)..(13): BNA scaffold modification
  misc_feature (18)..(18): BNA scaffold modification
auuuguauuuagcaugut

SEQ ID NO: 1753 - RNA, 18 nt, Artificial Sequence
  Antisense oligonucleotide
  misc_feature (1)..(1): BNA scaffold modification
  misc_feature (18)..(18): BNA scaffold modification
tuuguauuuagcauguuc

SEQ ID NO: 1754 - RNA, 18 nt, Artificial Sequence
  Antisense oligonucleotide
  misc_feature (1)..(1): BNA scaffold modification
  misc_feature (4)..(4): BNA scaffold modification
  misc_feature (18)..(18): BNA scaffold modification
tuuguauuuagcauguuc

SEQ ID NO: 1755 - RNA, 18 nt, Artificial Sequence
  Antisense oligonucleotide
  misc_feature (1)..(1): BNA scaffold modification
  misc_feature (11)..(11): BNA scaffold modification
  misc_feature (18)..(18): BNA scaffold modification
tuuguauuuagcauguuc

SEQ ID NO: 1756 - RNA, 18 nt, Artificial Sequence
  Antisense oligonucleotide
  misc_feature (1)..(1): BNA scaffold modification
  misc_feature (15)..(15): BNA scaffold modification
  misc_feature (18)..(18): BNA scaffold modification
tuuguauuuagcauguuc

SEQ ID NO: 1757 - RNA, 18 nt, Artificial Sequence
  Antisense oligonucleotide
  misc_feature (1)..(1): BNA scaffold modification
  misc_feature (4)..(4): BNA scaffold modification
  misc_feature (11)..(11): BNA scaffold modification
  misc_feature (18)..(18): BNA scaffold modification
tuuguauuuagcauguuc

SEQ ID NO: 1758 - RNA, 18 nt, Artificial Sequence
  Antisense oligonucleotide
  misc_feature (1)..(1): BNA scaffold modification
  misc_feature (4)..(4): BNA scaffold modification
  misc_feature (11)..(11): BNA scaffold modification
  misc_feature (15)..(15): BNA scaffold modification
  misc_feature (18)..(18): BNA scaffold modification
tuuguauuuagcauguuc

SEQ ID NO: 1759 - RNA, 18 nt, Artificial Sequence
  Antisense oligonucleotide
  misc_feature (1)..(1): BNA scaffold modification
  misc_feature (4)..(4): BNA scaffold modification
  misc_feature (11)..(12): BNA scaffold modification
  misc_feature (15)..(15): BNA scaffold modification
  misc_feature (18)..(18): BNA scaffold modification
tuuguauuuagcauguuc

SEQ ID NO: 1760 - RNA, 18 nt, Artificial Sequence
  Antisense oligonucleotide
  misc_feature (1)..(1): BNA scaffold modification
  misc_feature (18)..(18): BNA scaffold modification
tuguauuuagcauguucc

SEQ ID NO: 1761 - RNA, 18 nt, Artificial Sequence
  Antisense oligonucleotide
  misc_feature (1)..(1): BNA scaffold modification
  misc_feature (3)..(3): BNA scaffold modification
  misc_feature (18)..(18): BNA scaffold modification
tuguauuuagcauguucc

SEQ ID NO: 1762 - RNA, 18 nt, Artificial Sequence
  Antisense oligonucleotide
  misc_feature (1)..(1): BNA scaffold modification
  misc_feature (10)..(10): BNA scaffold modification
  misc_feature (18)..(18): BNA scaffold modification
tuguauuuagcauguucc

SEQ ID NO: 1763 - RNA, 18 nt, Artificial Sequence
  Antisense oligonucleotide
  misc_feature (1)..(1): BNA scaffold modification
  misc_feature (14)..(14): BNA scaffold modification
  misc_feature (18)..(18): BNA scaffold modification
tuguauuuagcauguucc

SEQ ID NO: 1764 - RNA, 18 nt, Artificial Sequence
  Antisense oligonucleotide
  misc_feature (1)..(1): BNA scaffold modification
  misc_feature (3)..(3): BNA scaffold modification
  misc_feature (10)..(10): BNA scaffold modification
  misc_feature (18)..(18): BNA scaffold modification
tuguauuuagcauguucc

SEQ ID NO: 1765 - RNA, 18 nt, Artificial Sequence
  Antisense oligonucleotide
  misc_feature (1)..(1): BNA scaffold modification
  misc_feature (10)..(10): BNA scaffold modification
  misc_feature (14)..(14): BNA scaffold modification
  misc_feature (18)..(18): BNA scaffold modification
tuguauuuagcauguucc

SEQ ID NO: 1766 - RNA, 18 nt, Artificial Sequence
  Antisense oligonucleotide
  misc_feature (1)..(1): BNA scaffold modification
  misc_feature (3)..(3): BNA scaffold modification
  misc_feature (10)..(10): BNA scaffold modification
  misc_feature (14)..(14): BNA scaffold modification
  misc_feature (18)..(18): BNA scaffold modification
tuguauuuagcauguucc

SEQ ID NO: 1767 - RNA, 18 nt, Artificial Sequence
  Antisense oligonucleotide
  misc_feature (1)..(1): BNA scaffold modification
  misc_feature (18)..(18): BNA scaffold modification
tguauuuagcauguuccc

SEQ ID NO: 1768 - RNA, 18 nt, Artificial Sequence
  Antisense oligonucleotide
  misc_feature (1)..(1): BNA scaffold modification
  misc_feature (18)..(18): BNA scaffold modification
tguauuuagcauguuccc

SEQ ID NO: 1769 - RNA, 18 nt, Artificial Sequence
  Antisense oligonucleotide
  misc_feature (1)..(1): BNA scaffold modification
  misc_feature (9)..(9): BNA scaffold modification
  misc_feature (18)..(18): BNA scaffold modification
tguauuuagcauguuccc

SEQ ID NO: 1770 - RNA, 18 nt, Artificial Sequence
  Antisense oligonucleotide
  misc_feature (1)..(1): BNA scaffold modification
  misc_feature (13)..(13): BNA scaffold modification
  misc_feature (18)..(18): BNA scaffold modification
tguauuuagcauguuccc

SEQ ID NO: 1771 - RNA, 18 nt, Artificial Sequence
  Antisense oligonucleotide
  misc_feature (1)..(2): BNA scaffold modification
  misc_feature (18)..(18): BNA scaffold modification
tguauuuagcauguuccc

SEQ ID NO: 1772 - RNA, 18 nt, Artificial Sequence
  Antisense oligonucleotide
  misc_feature (1)..(1): BNA scaffold modification
  misc_feature (9)..(10): BNA scaffold modification
  misc_feature (18)..(18): BNA scaffold modification
tguauuuagcauguuccc

SEQ ID NO: 1773 - RNA, 18 nt, Artificial Sequence
  Antisense oligonucleotide
  misc_feature (1)..(2): BNA scaffold modification
  misc_feature (9)..(9): BNA scaffold modification
  misc_feature (17)..(18): BNA scaffold modification
tguauuuagcauguuccc

SEQ ID NO: 1774 - RNA, 16 nt, Artificial Sequence
  Antisense oligonucleotide
  misc_feature (1)..(1): BNA scaffold modification
  misc_feature (16)..(16): BNA scaffold modification
ccauuuguauuuagca

SEQ ID NO: 1775 - RNA, 16 nt, Artificial Sequence
  Antisense oligonucleotide
  misc_feature (1)..(1): BNA scaffold modification
  misc_feature (7)..(7): BNA scaffold modification
  misc_feature (16)..(16): BNA scaffold modification
ccauuuguauuuagca

SEQ ID NO: 1776 - RNA, 16 nt, Artificial Sequence
  Antisense oligonucleotide
  misc_feature (1)..(1): BNA scaffold modification
  misc_feature (14)..(14): BNA scaffold modification
  misc_feature (16)..(16): BNA scaffold modification
ccauuuguauuuagca

SEQ ID NO: 1777 - RNA, 16 nt, Artificial Sequence
  Antisense oligonucleotide
  misc_feature (1)..(1): BNA scaffold modification
  misc_feature (7)..(7): BNA scaffold modification
  misc_feature (14)..(14): BNA scaffold modification
  misc_feature (16)..(16): BNA scaffold modification
ccauuuguauuuagca

SEQ ID NO: 1778 - RNA, 16 nt, Artificial Sequence
  Antisense oligonucleotide
  misc_feature (1)..(2): BNA scaffold modification
  misc_feature (15)..(16): BNA scaffold modification
ccauuuguauuuagca

SEQ ID NO: 1779 - RNA, 16 nt, Artificial Sequence
  Antisense oligonucleotide
  misc_feature (1)..(1): BNA scaffold modification
  misc_feature (14)..(14): BNA scaffold modification
  misc_feature (16)..(16): BNA scaffold modification
ccauuuguauuuagca

SEQ ID NO: 1780 - RNA, 16 nt, Artificial Sequence
  Antisense oligonucleotide
  misc_feature (1)..(2): BNA scaffold modification
  misc_feature (7)..(7): BNA scaffold modification
  misc_feature (16)..(16): BNA scaffold modification
ccauuuguauuuagca

SEQ ID NO: 1781 - RNA, 16 nt, Artificial Sequence
  Antisense oligonucleotide
  misc_feature (1)..(1): BNA scaffold modification
  misc_feature (16)..(16): BNA scaffold modification
cauuuguauuuagcat

SEQ ID NO: 1782 - RNA, 16 nt, Artificial Sequence
  Antisense oligonucleotide
  misc_feature (1)..(1): BNA scaffold modification
  misc_feature (6)..(6): BNA scaffold modification
  misc_feature (16)..(16): BNA scaffold modification
cauuuguauuuagcat

SEQ ID NO: 1783 - RNA, 16 nt, Artificial Sequence
  Antisense oligonucleotide
  misc_feature (1)..(1): BNA scaffold modification
  misc_feature (13)..(13): BNA scaffold modification
  misc_feature (16)..(16): BNA scaffold modification
cauuuguauuuagcat

SEQ ID NO: 1784 - RNA, 16 nt, Artificial Sequence
  Antisense oligonucleotide
  misc_feature (1)..(1): BNA scaffold modification
  misc_feature (14)..(14): BNA scaffold modification
  misc_feature (16)..(16): BNA scaffold modification
cauuuguauuuagcat

SEQ ID NO: 1785 - RNA, 16 nt, Artificial Sequence
  Antisense oligonucleotide
  misc_feature (1)..(1): BNA scaffold modification
  misc_feature (6)..(6): BNA scaffold modification
  misc_feature (13)..(13): BNA scaffold modification
  misc_feature (16)..(16): BNA scaffold modification
cauuuguauuuagcat

SEQ ID NO: 1786 - RNA, 16 nt, Artificial Sequence
  Antisense oligonucleotide
  misc_feature (1)..(1): BNA scaffold modification
  misc_feature (6)..(6): BNA scaffold modification
  misc_feature (13)..(14): BNA scaffold modification
  misc_feature (16)..(16): BNA scaffold modification
cauuuguauuuagcat

SEQ ID NO: 1787 - RNA, 16 nt, Artificial Sequence
  Antisense oligonucleotide
  misc_feature (1)..(2): BNA scaffold modification
  misc_feature (6)..(6): BNA scaffold modification
  misc_feature (15)..(16): BNA scaffold modification
cauuuguauuuagcat

SEQ ID NO: 1788 - RNA, 16 nt, Artificial Sequence
  Antisense oligonucleotide
  misc_feature (1)..(1): BNA scaffold modification
  misc_feature (16)..(16): BNA scaffold modification
cauuuguauuuagcat

SEQ ID NO: 1789 - RNA, 16 nt, Artificial Sequence
  Antisense oligonucleotide
  misc_feature (1)..(1): BNA scaffold modification
  misc_feature (16)..(16): BNA scaffold modification
auuuguauuuagcaug

SEQ ID NO: 1790 - RNA, 16 nt, Artificial Sequence
  Antisense oligonucleotide
  misc_feature (1)..(1): BNA scaffold modification
  misc_feature (5)..(5): BNA scaffold modification
  misc_feature (16)..(16): BNA scaffold modification
auuuguauuuagcaug

SEQ ID NO: 1791 - RNA, 16 nt, Artificial Sequence
  Antisense oligonucleotide
  misc_feature (1)..(1): BNA scaffold modification
  misc_feature (12)..(12): BNA scaffold modification
  misc_feature (16)..(16): BNA scaffold modification
auuuguauuuagcaug

SEQ ID NO: 1792 - RNA, 16 nt, Artificial Sequence
  Antisense oligonucleotide
  misc_feature (1)..(1): BNA scaffold modification
  misc_feature (13)..(13): BNA scaffold modification
  misc_feature (16)..(16): BNA scaffold modification
auuuguauuuagcaug

SEQ ID NO: 1793 - RNA, 16 nt, Artificial Sequence
  Antisense oligonucleotide
  misc_feature (1)..(1): BNA scaffold modification
  misc_feature (5)..(5): BNA scaffold modification
  misc_feature (12)..(12): BNA scaffold modification
  misc_feature (16)..(16): BNA scaffold modification
auuuguauuuagcaug

SEQ ID NO: 1794 - RNA, 16 nt, Artificial Sequence
  Antisense oligonucleotide
  misc_feature (1)..(1): BNA scaffold modification
  misc_feature (5)..(5): BNA scaffold modification
  misc_feature (12)..(13): BNA scaffold modification
  misc_feature (16)..(16): BNA scaffold modification
auuuguauuuagcaug

SEQ ID NO: 1795 - RNA, 16 nt, Artificial Sequence
  Antisense oligonucleotide
  misc_feature (1)..(2): BNA scaffold modification
  misc_feature (15)..(16): BNA scaffold modification
atuuguauuuagcatg

SEQ ID NO: 1796 - RNA, 16 nt, Artificial Sequence
  Antisense oligonucleotide
  misc_feature (1)..(2): BNA scaffold modification
  misc_feature (5)..(5): BNA scaffold modification
  misc_feature (12)..(12): BNA scaffold modification
  misc_feature (15)..(16): BNA scaffold modification
atuuguauuuagcatg

SEQ ID NO: 1797 - RNA, 16 nt, Artificial Sequence
  Antisense oligonucleotide
  misc_feature (1)..(1): BNA scaffold modification
  misc_feature (16)..(16): BNA scaffold modification
tuuguauuuagcaugt

SEQ ID NO: 1798 - RNA, 16 nt, Artificial Sequence
  Antisense oligonucleotide
  misc_feature (1)..(1): BNA scaffold modification
  misc_feature (4)..(4): BNA scaffold modification
  misc_feature (16)..(16): BNA scaffold modification
tuuguauuuagcaugt

SEQ ID NO: 1799 - RNA, 16 nt, Artificial Sequence
  Antisense oligonucleotide
  misc_feature (1)..(1): BNA scaffold modification
  misc_feature (11)..(11): BNA scaffold modification
  misc_feature (16)..(16): BNA scaffold modification
tuuguauuuagcaugt

SEQ ID NO: 1800 - RNA, 16 nt, Artificial Sequence
  Antisense oligonucleotide
  misc_feature (1)..(1): BNA scaffold modification
  misc_feature (15)..(16): BNA scaffold modification
tuuguauuuagcaugt

SEQ ID NO: 1801 - RNA, 16 nt, Artificial Sequence
  Antisense oligonucleotide
  misc_feature (1)..(1): BNA scaffold modification
  misc_feature (4)..(4): BNA scaffold modification
  misc_feature (11)..(11): BNA scaffold modification
  misc_feature (16)..(16): BNA scaffold modification
tuuguauuuagcaugt

SEQ ID NO: 1802 - RNA, 16 nt, Artificial Sequence
  Antisense oligonucleotide
  misc_feature (1)..(2): BNA scaffold modification
  misc_feature (4)..(4): BNA scaffold modification
  misc_feature (11)..(11): BNA scaffold modification
  misc_feature (15)..(16): BNA scaffold modification
tuuguauuuagcaugt

SEQ ID NO: 1803 - RNA, 16 nt, Artificial Sequence
  Antisense oligonucleotide
  misc_feature (1)..(2): BNA scaffold modification
  misc_feature (15)..(16): BNA scaffold modification
ttuguauuuagcaugt

SEQ ID NO: 1804 - RNA, 16 nt, Artificial Sequence
  Antisense oligonucleotide
  misc_feature (1)..(2): BNA scaffold modification
  misc_feature (11)..(11): BNA scaffold modification
  misc_feature (15)..(16): BNA scaffold modification
ttuguauuuagcaugt

SEQ ID NO: 1805 - RNA, 16 nt, Artificial Sequence
  Antisense oligonucleotide
  misc_feature (1)..(1): BNA scaffold modification
  misc_feature (16)..(16): BNA scaffold modification
tuguauuuagcaugut

SEQ ID NO: 1806 - RNA, 16 nt, Artificial Sequence
  Antisense oligonucleotide
  misc_feature (1)..(1): BNA scaffold modification
  misc_feature (3)..(3): BNA scaffold modification
  misc_feature (16)..(16): BNA scaffold modification
tuguauuuagcaugut

SEQ ID NO: 1807 - RNA, 16 nt, Artificial Sequence
  Antisense oligonucleotide
  misc_feature (1)..(1): BNA scaffold modification
  misc_feature (16)..(16): BNA scaffold modification
tuguauuuagcaugut

SEQ ID NO: 1808 - RNA, 16 nt, Artificial Sequence
  Antisense oligonucleotide
  misc_feature (1)..(1): BNA scaffold modification
  misc_feature (10)..(10): BNA scaffold modification
  misc_feature (16)..(16): BNA scaffold modification
tuguauuuagcaugut

SEQ ID NO: 1809 - RNA, 16 nt, Artificial Sequence
  Antisense oligonucleotide
  misc_feature (1)..(1): BNA scaffold modification
  misc_feature (10)..(10): BNA scaffold modification
  misc_feature (14)..(14): BNA scaffold modification
  misc_feature (16)..(16): BNA scaffold modification
tuguauuuagcaugut

SEQ ID NO: 1810 - RNA, 16 nt, Artificial Sequence
  Antisense oligonucleotide
  misc_feature (1)..(1): BNA scaffold modification
  misc_feature (3)..(3): BNA scaffold modification
  misc_feature (14)..(14): BNA scaffold modification
  misc_feature (16)..(16): BNA scaffold modification
tuguauuuagcaugut

SEQ ID NO: 1811 - RNA, 16 nt, Artificial Sequence
  Antisense oligonucleotide
  misc_feature (1)..(1): BNA scaffold modification
  misc_feature (3)..(3): BNA scaffold modification
  misc_feature (10)..(10): BNA scaffold modification
  misc_feature (14)..(14): BNA scaffold modification
  misc_feature (16)..(16): BNA scaffold modification
tuguauuuagcaugut

SEQ ID NO: 1812 - RNA, 16 nt, Artificial Sequence
  Antisense oligonucleotide
  misc_feature (1)..(2): BNA scaffold modification
  misc_feature (15)..(16): BNA scaffold modification
tuguauuuagcaugtt

SEQ ID NO: 1813 - RNA, 16 nt, Artificial Sequence
  Antisense oligonucleotide
  misc_feature (1)..(1): BNA scaffold modification
  misc_feature (16)..(16): BNA scaffold modification
tguauuuagcauguuc

SEQ ID NO: 1814 - RNA, 16 nt, Artificial Sequence
  Antisense oligonucleotide
  misc_feature (1)..(1): BNA scaffold modification
  misc_feature (9)..(9): BNA scaffold modification
  misc_feature (16)..(16): BNA scaffold modification
tguauuuagcauguuc

SEQ ID NO: 1815 - RNA, 16 nt, Artificial Sequence
  Antisense oligonucleotide
  misc_feature (1)..(1): BNA scaffold modification
  misc_feature (13)..(13): BNA scaffold modification
  misc_feature (16)..(16): BNA scaffold modification
tguauuuagcauguuc

SEQ ID NO: 1816 - RNA, 16 nt, Artificial Sequence
  Antisense oligonucleotide
  misc_feature (1)..(1): BNA scaffold modification
  misc_feature (10)..(10): BNA scaffold modification
  misc_feature (13)..(13): BNA scaffold modification
  misc_feature (16)..(16): BNA scaffold modification
tguauuuagcauguuc

SEQ ID NO: 1817 - RNA, 16 nt, Artificial Sequence
  Antisense oligonucleotide
  misc_feature (1)..(2): BNA scaffold modification
  misc_feature (9)..(9): BNA scaffold modification
  misc_feature (16)..(16): BNA scaffold modification
tguauuuagcauguuc

SEQ ID NO: 1818 - RNA, 16 nt, Artificial Sequence
  Antisense oligonucleotide
  misc_feature (1)..(2): BNA scaffold modification
  misc_feature (9)..(10): BNA scaffold modification
  misc_feature (13)..(13): BNA scaffold modification
  misc_feature (16)..(16): BNA scaffold modification
tguauuuagcauguuc

SEQ ID NO: 1819 - RNA, 16 nt, Artificial Sequence
  Antisense oligonucleotide
  misc_feature (1)..(2): BNA scaffold modification
  misc_feature (9)..(9): BNA scaffold modification
  misc_feature (13)..(13): BNA scaffold modification
  misc_feature (16)..(16): BNA scaffold modification
tguauuuagcauguuc

SEQ ID NO: 1820 - RNA, 16 nt, Artificial Sequence
  Antisense oligonucleotide
  misc_feature (1)..(1): BNA scaffold modification
  misc_feature (16)..(16): BNA scaffold modification
guauuuagcauguucc

SEQ ID NO: 1821 - RNA, 16 nt, Artificial Sequence
  Antisense oligonucleotide
  misc_feature (1)..(1): BNA scaffold modification
  misc_feature (8)..(8): BNA scaffold modification
  misc_feature (16)..(16): BNA scaffold modification
guauuuagcauguucc

SEQ ID NO: 1822 - RNA, 16 nt, Artificial Sequence
  Antisense oligonucleotide
  misc_feature (1)..(1): BNA scaffold modification
  misc_feature (9)..(9): BNA scaffold modification
  misc_feature (16)..(16): BNA scaffold modification
guauuuagcauguucc

SEQ ID NO: 1823 - RNA, 16 nt, Artificial Sequence
  Antisense oligonucleotide
  misc_feature (1)..(1): BNA scaffold modification
  misc_feature (12)..(12): BNA scaffold modification
  misc_feature (16)..(16): BNA scaffold modification
guauuuagcauguucc

SEQ ID NO: 1824 - RNA, 16 nt, Artificial Sequence
  Antisense oligonucleotide
  misc_feature (1)..(1): BNA scaffold modification
  misc_feature (8)..(8): BNA scaffold modification
  misc_feature (12)..(12): BNA scaffold modification
  misc_feature (16)..(16): BNA scaffold modification
guauuuagcauguucc

SEQ ID NO: 1825 - RNA, 16 nt, Artificial Sequence
  Antisense oligonucleotide
  misc_feature (1)..(1): BNA scaffold modification
  misc_feature (8)..(9): BNA scaffold modification
  misc_feature (12)..(12): BNA scaffold modification
  misc_feature (16)..(16): BNA scaffold modification
guauuuagcauguucc

SEQ ID NO: 1826 - RNA, 16 nt, Artificial Sequence
  Antisense oligonucleotide
  misc_feature (1)..(2): BNA scaffold modification
  misc_feature (8)..(9): BNA scaffold modification
  misc_feature (15)..(16): BNA scaffold modification
gtauuuagcauguucc

SEQ ID NO: 1827 - RNA, 16 nt, Artificial Sequence
  Antisense oligonucleotide
  misc_feature (1)..(1): BNA scaffold modification
  misc_feature (8)..(9): BNA scaffold modification
  misc_feature (16)..(16): BNA scaffold modification
guauuuagcauguucc

SEQ ID NO: 1828 - RNA, 16 nt, Artificial Sequence
  Antisense oligonucleotide
  misc_feature (1)..(1): BNA scaffold modification
  misc_feature (16)..(16): BNA scaffold modification
tauuuagcauguuccc

SEQ ID NO: 1829 - RNA, 16 nt, Artificial Sequence
  Antisense oligonucleotide
  misc_feature (1)..(1): BNA scaffold modification
  misc_feature (7)..(7): BNA scaffold modification
  misc_feature (16)..(16): BNA scaffold modification
tauuuagcauguuccc

SEQ ID NO: 1830 - RNA, 16 nt, Artificial Sequence
  Antisense oligonucleotide
  misc_feature (1)..(1): BNA scaffold modification
  misc_feature (8)..(8): BNA scaffold modification
  misc_feature (16)..(16): BNA scaffold modification
tauuuagcauguuccc

SEQ ID NO: 1831 - RNA, 16 nt, Artificial Sequence
  Antisense oligonucleotide
  misc_feature (1)..(1): BNA scaffold modification
  misc_feature (11)..(11): BNA scaffold modification
  misc_feature (16)..(16): BNA scaffold modification
tauuuagcauguuccc

SEQ ID NO: 1832 - RNA, 16 nt, Artificial Sequence
  Antisense oligonucleotide
  misc_feature (1)..(1): BNA scaffold modification
  misc_feature (14)..(14): BNA scaffold modification
  misc_feature (16)..(16): BNA scaffold modification
tauuuagcauguuccc

SEQ ID NO: 1833 - RNA, 16 nt, Artificial Sequence
  Antisense oligonucleotide
  misc_feature (1)..(1): BNA scaffold modification
  misc_feature (8)..(8): BNA scaffold modification
  misc_feature (14)..(14): BNA scaffold modification
  misc_feature (16)..(16): BNA scaffold modification
tauuuagcauguuccc

SEQ ID NO: 1834 - RNA, 16 nt, Artificial Sequence
  Antisense oligonucleotide
  misc_feature (1)..(1): BNA scaffold modification
  misc_feature (7)..(7): BNA scaffold modification
  misc_feature (11)..(11): BNA scaffold modification
  misc_feature (16)..(16): BNA scaffold modification
tauuuagcauguuccc

SEQ ID NO: 1835 - RNA, 16 nt, Artificial Sequence
  Antisense oligonucleotide
  misc_feature (1)..(1): BNA scaffold modification
  misc_feature (7)..(7): BNA scaffold modification
  misc_feature (11)..(11): BNA scaffold modification
  misc_feature (14)..(14): BNA scaffold modification
  misc_feature (16)..(16): BNA scaffold modification
tauuuagcauguuccc

SEQ ID NO: 1836 - RNA, 16 nt, Artificial Sequence
  Antisense oligonucleotide
  misc_feature (1)..(1): BNA scaffold modification
  misc_feature (7)..(8): BNA scaffold modification
  misc_feature (11)..(11): BNA scaffold modification
  misc_feature (14)..(16): BNA scaffold modification
tauuuagcauguuccc

SEQ ID NO: 1837 - RNA, 23 nt, Artificial Sequence
  Antisense oligonucleotide
  misc_feature (1)..(1): BNA scaffold modification
  misc_feature (4)..(4): BNA scaffold modification
  misc_feature (23)..(23): BNA scaffold modification
auucucaggaauuugugucuuuc

SEQ ID NO: 1838 - RNA, 23 nt, Artificial Sequence
  Antisense oligonucleotide
  misc_feature (1)..(1): BNA scaffold modification
  misc_feature (6)..(6): BNA scaffold modification
  misc_feature (23)..(23): BNA scaffold modification
auucucaggaauuugugucuuuc

SEQ ID NO: 1839 - RNA, 23 nt, Artificial Sequence
  Antisense oligonucleotide
  misc_feature (1)..(1): BNA scaffold modification
  misc_feature (8)..(8): BNA scaffold modification
  misc_feature (23)..(23): BNA scaffold modification
auucucaggaauuugugucuuuc

SEQ ID NO: 1840 - RNA, 23 nt, Artificial Sequence
  Antisense oligonucleotide
  misc_feature (1)..(1): BNA scaffold modification
  misc_feature (9)..(9): BNA scaffold modification
  misc_feature (23)..(23): BNA scaffold modification
auucucaggaauuugugucuuuc

SEQ ID NO: 1841 - RNA, 23 nt, Artificial Sequence
  Antisense oligonucleotide
  misc_feature (1)..(1): BNA scaffold modification
  misc_feature (15)..(15): BNA scaffold modification
  misc_feature (23)..(23): BNA scaffold modification
auucucaggaauuugugucuuuc

SEQ ID NO: 1842 - RNA, 23 nt, Artificial Sequence
  Antisense oligonucleotide
  misc_feature (1)..(1): BNA scaffold modification
  misc_feature (17)..(17): BNA scaffold modification
  misc_feature (23)..(23): BNA scaffold modification
auucucaggaauuugugucuuuc

SEQ ID NO: 1843 - RNA, 23 nt, Artificial Sequence
  Antisense oligonucleotide
  misc_feature (1)..(1): BNA scaffold modification
  misc_feature (19)..(19): BNA scaffold modification
  misc_feature (23)..(23): BNA scaffold modification
auucucaggaauuugugucuuuc

SEQ ID NO: 1844 - RNA, 23 nt, Artificial Sequence
  Antisense oligonucleotide
  misc_feature (1)..(1): BNA scaffold modification
  misc_feature (6)..(6): BNA scaffold modification
  misc_feature (19)..(19): BNA scaffold modification
  misc_feature (23)..(23): BNA scaffold modification
auucucaggaauuugugucuuuc

SEQ ID NO: 1845 - RNA, 23 nt, Artificial Sequence
  Antisense oligonucleotide
  misc_feature (1)..(1): BNA scaffold modification
  misc_feature (8)..(8): BNA scaffold modification
  misc_feature (15)..(15): BNA scaffold modification
  misc_feature (23)..(23): BNA scaffold modification
auucucaggaauuugugucuuuc

SEQ ID NO: 1846 - RNA, 23 nt, Artificial Sequence
  Antisense oligonucleotide
  misc_feature (1)..(1): BNA scaffold modification
  misc_feature (9)..(9): BNA scaffold modification
  misc_feature (17)..(17): BNA scaffold modification
  misc_feature (23)..(23): BNA scaffold modification
auucucaggaauuugugucuuuc

SEQ ID NO: 1847 - RNA, 23 nt, Artificial Sequence
  Antisense oligonucleotide
  misc_feature (1)..(1): BNA scaffold modification
  misc_feature (4)..(4): BNA scaffold modification
  misc_feature (9)..(9): BNA scaffold modification
  misc_feature (15)..(15): BNA scaffold modification
  misc_feature (19)..(19): BNA scaffold modification
  misc_feature (23)..(23): BNA scaffold modification
auucucaggaauuugugucuuuc

SEQ ID NO: 1848 - RNA, 20 nt, Artificial Sequence
  Antisense oligonucleotide
  misc_feature (1)..(1): BNA scaffold modification
  misc_feature (20)..(20): BNA scaffold modification
auucucaggaauuuguguct

SEQ ID NO: 1849 - RNA, 20 nt, Artificial Sequence
  Antisense oligonucleotide
  misc_feature (1)..(1): BNA scaffold modification
  misc_feature (4)..(4): BNA scaffold modification
  misc_feature (20)..(20): BNA scaffold modification
auucucaggaauuuguguct

SEQ ID NO: 1850 - RNA, 20 nt, Artificial Sequence
  Antisense oligonucleotide
  misc_feature (1)..(1): BNA scaffold modification
  misc_feature (6)..(6): BNA scaffold modification
  misc_feature (20)..(20): BNA scaffold modification
auucucaggaauuuguguct

SEQ ID NO: 1851 - RNA, 20 nt, Artificial Sequence
  Antisense oligonucleotide
  misc_feature (1)..(1): BNA scaffold modification
  misc_feature (9)..(9): BNA scaffold modification
  misc_feature (20)..(20): BNA scaffold modification
auucucaggaauuuguguct

SEQ ID NO: 1852 - RNA, 20 nt, Artificial Sequence
  Antisense oligonucleotide
  misc_feature (1)..(1): BNA scaffold modification
  misc_feature (15)..(15): BNA scaffold modification
  misc_feature (20)..(20): BNA scaffold modification
auucucaggaauuuguguct

SEQ ID NO: 1853 - RNA, 20 nt, Artificial Sequence
  Antisense oligonucleotide
  misc_feature (1)..(1): BNA scaffold modification
  misc_feature (17)..(17): BNA scaffold modification
  misc_feature (20)..(20): BNA scaffold modification
auucucaggaauuuguguct

SEQ ID NO: 1854 - RNA, 20 nt, Artificial Sequence
  Antisense oligonucleotide
  misc_feature (1)..(1): BNA scaffold modification
  misc_feature (8)..(8): BNA scaffold modification
  misc_feature (17)..(17): BNA scaffold modification
  misc_feature (20)..(20): BNA scaffold modification
auucucaggaauuuguguct

SEQ ID NO: 1855 - RNA, 20 nt, Artificial Sequence
  Antisense oligonucleotide
  misc_feature (1)..(1): BNA scaffold modification
  misc_feature (4)..(4): BNA scaffold modification
  misc_feature (15)..(15): BNA scaffold modification
  misc_feature (20)..(20): BNA scaffold modification
auucucaggaauuuguguct

SEQ ID NO: 1856 - RNA, 20 nt, Artificial Sequence
  Antisense oligonucleotide
  misc_feature (1)..(1): BNA scaffold modification
  misc_feature (4)..(4): BNA scaffold modification
  misc_feature (6)..(6): BNA scaffold modification
  misc_feature (20)..(20): BNA scaffold modification
auucucaggaauuuguguct

SEQ ID NO: 1857 - RNA, 20 nt, Artificial Sequence
  Antisense oligonucleotide
  misc_feature (1)..(1): BNA scaffold modification
  misc_feature (4)..(4): BNA scaffold modification
  misc_feature (6)..(6): BNA scaffold modification
  misc_feature (19)..(20): BNA scaffold modification
auucucaggaauuuguguct

SEQ ID NO: 1858 - RNA, 20 nt, Artificial Sequence
  Antisense oligonucleotide
  misc_feature (1)..(1): BNA scaffold modification
  misc_feature (9)..(9): BNA scaffold modification
  misc_feature (15)..(15): BNA scaffold modification
  misc_feature (17)..(17): BNA scaffold modification
  misc_feature (20)..(20): BNA scaffold modification
auucucaggaauuuguguct

SEQ ID NO: 1859 - RNA, 20 nt, Artificial Sequence
  Antisense oligonucleotide
  misc_feature (1)..(2): BNA scaffold modification
  misc_feature (8)..(8): BNA scaffold modification
  misc_feature (15)..(15): BNA scaffold modification
  misc_feature (19)..(20): BNA scaffold modification
atucucaggaauuuguguct

SEQ ID NO: 1860 - RNA, 20 nt, Artificial Sequence
  Antisense oligonucleotide
  misc_feature (1)..(1): BNA scaffold modification
  misc_feature (20)..(20): BNA scaffold modification
tucucaggaauuugugucut

SEQ ID NO: 1861 - RNA, 20 nt, Artificial Sequence
  Antisense oligonucleotide
  misc_feature (1)..(1): BNA scaffold modification
  misc_feature (3)..(3): BNA scaffold modification
  misc_feature (20)..(20): BNA scaffold modification
tucucaggaauuugugucut

SEQ ID NO: 1862 - RNA, 20 nt, Artificial Sequence
  Antisense oligonucleotide
  misc_feature (1)..(1): BNA scaffold modification
  misc_feature (5)..(5): BNA scaffold modification
  misc_feature (20)..(20): BNA scaffold modification
tucucaggaauuugugucut

SEQ ID NO: 1863 - RNA, 20 nt, Artificial Sequence
  Antisense oligonucleotide
  misc_feature (1)..(1): BNA scaffold modification
  misc_feature (7)..(7): BNA scaffold modification
  misc_feature (20)..(20): BNA scaffold modification
tucucaggaauuugugucut

SEQ ID NO: 1864 - RNA, 20 nt, Artificial Sequence
  Antisense oligonucleotide
  misc_feature (1)..(1): BNA scaffold modification
  misc_feature (8)..(8): BNA scaffold modification
  misc_feature (20)..(20): BNA scaffold modification
tucucaggaauuugugucut

SEQ ID NO: 1865 - RNA, 20 nt, Artificial Sequence
  Antisense oligonucleotide
  misc_feature (1)..(1): BNA scaffold modification
  misc_feature (14)..(14): BNA scaffold modification
  misc_feature (20)..(20): BNA scaffold modification
tucucaggaauuugugucut

SEQ ID NO: 1866 - RNA, 20 nt, Artificial Sequence
  Antisense oligonucleotide
  misc_feature (1)..(1): BNA scaffold modification
  misc_feature (16)..(16): BNA scaffold modification
  misc_feature (20)..(20): BNA scaffold modification
tucucaggaauuugugucut

SEQ ID NO: 1867 - RNA, 20 nt, Artificial Sequence
  Antisense oligonucleotide
  misc_feature (1)..(1): BNA scaffold modification
  misc_feature (18)..(18): BNA scaffold modification
  misc_feature (20)..(20): BNA scaffold modification
tucucaggaauuugugucut

SEQ ID NO: 1868 - RNA, 20 nt, Artificial Sequence
  Antisense oligonucleotide
  misc_feature (1)..(1): BNA scaffold modification
  misc_feature (3)..(3): BNA scaffold modification
  misc_feature (5)..(5): BNA scaffold modification
  misc_feature (20)..(20): BNA scaffold modification
tucucaggaauuugugucut

SEQ ID NO: 1869 - RNA, 20 nt, Artificial Sequence
  Antisense oligonucleotide
  misc_feature (1)..(1): BNA scaffold modification
  misc_feature (3)..(3): BNA scaffold modification
  misc_feature (5)..(5): BNA scaffold modification
  misc_feature (18)..(18): BNA scaffold modification
  misc_feature (20)..(20): BNA scaffold modification
tucucaggaauuugugucut

SEQ ID NO: 1870 - RNA, 20 nt, Artificial Sequence
  Antisense oligonucleotide
  misc_feature (1)..(1): BNA scaffold modification
  misc_feature (7)..(7): BNA scaffold modification
  misc_feature (16)..(16): BNA scaffold modification
  misc_feature (20)..(20): BNA scaffold modification
tucucaggaauuugugucut

SEQ ID NO: 1871 - RNA, 20 nt, Artificial Sequence
  Antisense oligonucleotide
  misc_feature (1)..(1): BNA scaffold modification
  misc_feature (7)..(7): BNA scaffold modification
  misc_feature (14)..(14): BNA scaffold modification
  misc_feature (16)..(16): BNA scaffold modification
  misc_feature (20)..(20): BNA scaffold modification
tucucaggaauuugugucut

SEQ ID NO: 1872 - RNA, 20 nt, Artificial Sequence
  Antisense oligonucleotide
  misc_feature (1)..(1): BNA scaffold modification
  misc_feature (3)..(3): BNA scaffold modification
  misc_feature (8)..(8): BNA scaffold modification
  misc_feature (14)..(14): BNA scaffold modification
  misc_feature (18)..(18): BNA scaffold modification
  misc_feature (20)..(20): BNA scaffold modification
tucucaggaauuugugucut

SEQ ID NO: 1873 - RNA, 20 nt, Artificial Sequence
  Antisense oligonucleotide
  misc_feature (1)..(1): BNA scaffold modification
  misc_feature (20)..(20): BNA scaffold modification
tcucaggaauuugugucuut

SEQ ID NO: 1874 - RNA, 20 nt, Artificial Sequence
  Antisense oligonucleotide
  misc_feature (1)..(1): BNA scaffold modification
  misc_feature (4)..(4): BNA scaffold modification
  misc_feature (20)..(20): BNA scaffold modification
tcucaggaauuugugucuut

SEQ ID NO: 1875 - RNA, 20 nt, Artificial Sequence
  Antisense oligonucleotide
  misc_feature (1)..(1): BNA scaffold modification
  misc_feature (6)..(6): BNA scaffold modification
  misc_feature (20)..(20): BNA scaffold modification
tcucaggaauuugugucuut

SEQ ID NO: 1876 - RNA, 20 nt, Artificial Sequence
  Antisense oligonucleotide
  misc_feature (1)..(1): BNA scaffold modification
  misc_feature (7)..(7): BNA scaffold modification
  misc_feature (20)..(20): BNA scaffold modification
tcucaggaauuugugucuut

SEQ ID NO: 1877 - RNA, 20 nt, Artificial Sequence
  Antisense oligonucleotide
  misc_feature (1)..(1): BNA scaffold modification
  misc_feature (13)..(13): BNA scaffold modification
  misc_feature (20)..(20): BNA scaffold modification
tcucaggaauuugugucuut

SEQ ID NO: 1878 - RNA, 20 nt, Artificial Sequence
  Antisense oligonucleotide
  misc_feature (1)..(1): BNA scaffold modification
  misc_feature (15)..(15): BNA scaffold modification
  misc_feature (20)..(20): BNA scaffold modification
tcucaggaauuugugucuut

SEQ ID NO: 1879 - RNA, 20 nt, Artificial Sequence
  Antisense oligonucleotide
  misc_feature (1)..(1): BNA scaffold modification
  misc_feature (17)..(17): BNA scaffold modification
  misc_feature (20)..(20): BNA scaffold modification
tcucaggaauuugugucuut

SEQ ID NO: 1880 - RNA, 20 nt, Artificial Sequence
  Antisense oligonucleotide
  misc_feature (1)..(1): BNA scaffold modification
  misc_feature (4)..(4): BNA scaffold modification
  misc_feature (17)..(17): BNA scaffold modification
  misc_feature (20)..(20): BNA scaffold modification
tcucaggaauuugugucuut

SEQ ID NO: 1881 - RNA, 20 nt, Artificial Sequence
  Antisense oligonucleotide
  misc_feature (1)..(1): BNA scaffold modification
  misc_feature (6)..(6): BNA scaffold modification
  misc_feature (15)..(15): BNA scaffold modification
  misc_feature (20)..(20): BNA scaffold modification
tcucaggaauuugugucuut

SEQ ID NO: 1882 - RNA, 20 nt, Artificial Sequence
  Antisense oligonucleotide
  misc_feature (1)..(1): BNA scaffold modification
  misc_feature (7)..(7): BNA scaffold modification
  misc_feature (13)..(13): BNA scaffold modification
  misc_feature (20)..(20): BNA scaffold modification
tcucaggaauuugugucuut

SEQ ID NO: 1883 - RNA, 20 nt, Artificial Sequence
  Antisense oligonucleotide
  misc_feature (1)..(2): BNA scaffold modification
  misc_feature (19)..(20): BNA scaffold modification
tcucaggaauuugugucutt

SEQ ID NO: 1884 - RNA, 20 nt, Artificial Sequence
  Antisense oligonucleotide
  misc_feature (1)..(2): BNA scaffold modification
  misc_feature (4)..(4): BNA scaffold modification
  misc_feature (17)..(17): BNA scaffold modification
  misc_feature (20)..(20): BNA scaffold modification
tcucaggaauuugugucuut

SEQ ID NO: 1885 - RNA, 20 nt, Artificial Sequence
  Antisense oligonucleotide
  misc_feature (1)..(1): BNA scaffold modification
  misc_feature (6)..(7): BNA scaffold modification
  misc_feature (13)..(13): BNA scaffold modification
  misc_feature (15)..(15): BNA scaffold modification
  misc_feature (20)..(20): BNA scaffold modification
tcucaggaauuugugucuut

SEQ ID NO: 1886 - RNA, 20 nt, Artificial Sequence
  Antisense oligonucleotide
  misc_feature (1)..(1): BNA scaffold modification
  misc_feature (20)..(20): BNA scaffold modification
cucaggaauuugugucuuuc

SEQ ID NO: 1887 - RNA, 20 nt, Artificial Sequence
  Antisense oligonucleotide
  misc_feature (1)..(1): BNA scaffold modification
  misc_feature (3)..(3): BNA scaffold modification
  misc_feature (20)..(20): BNA scaffold modification
cucaggaauuugugucuuuc

SEQ ID NO: 1888 - RNA, 20 nt, Artificial Sequence
  Antisense oligonucleotide
  misc_feature (1)..(1): BNA scaffold modification
  misc_feature (5)..(5): BNA scaffold modification
  misc_feature (20)..(20): BNA scaffold modification
cucaggaauuugugucuuuc

SEQ ID NO: 1889 - RNA, 20 nt, Artificial Sequence
  Antisense oligonucleotide
  misc_feature (1)..(1): BNA scaffold modification
  misc_feature (6)..(6): BNA scaffold modification
  misc_feature (20)..(20): BNA scaffold modification
cucaggaauuugugucuuuc

SEQ ID NO: 1890 - RNA, 20 nt, Artificial Sequence
  Antisense oligonucleotide
  misc_feature (1)..(1): BNA scaffold modification
  misc_feature (12)..(12): BNA scaffold modification
  misc_feature (20)..(20): BNA scaffold modification
cucaggaauuugugucuuuc

SEQ ID NO: 1891 - RNA, 20 nt, Artificial Sequence
  Antisense oligonucleotide
  misc_feature (1)..(1): BNA scaffold modification
  misc_feature (14)..(14): BNA scaffold modification
  misc_feature (20)..(20): BNA scaffold modification
cucaggaauuugugucuuuc

SEQ ID NO: 1892 - RNA, 20 nt, Artificial Sequence
  Antisense oligonucleotide
  misc_feature (1)..(1): BNA scaffold modification
  misc_feature (16)..(16): BNA scaffold modification
  misc_feature (20)..(20): BNA scaffold modification
cucaggaauuugugucuuuc

SEQ ID NO: 1893 - RNA, 20 nt, Artificial Sequence
  Antisense oligonucleotide
  misc_feature (1)..(1): BNA scaffold modification
  misc_feature (3)..(3): BNA scaffold modification
  misc_feature (16)..(16): BNA scaffold modification
  misc_feature (20)..(20): BNA scaffold modification
cucaggaauuugugucuuuc

SEQ ID NO: 1894 - RNA, 20 nt, Artificial Sequence
  Antisense oligonucleotide
  misc_feature (1)..(1): BNA scaffold modification
  misc_feature (3)..(3): BNA scaffold modification
  misc_feature (12)..(12): BNA scaffold modification
  misc_feature (16)..(16): BNA scaffold modification
  misc_feature (20)..(20): BNA scaffold modification
cucaggaauuugugucuuuc

SEQ ID NO: 1895 - RNA, 20 nt, Artificial Sequence
  Antisense oligonucleotide
  misc_feature (1)..(1): BNA scaffold modification
  misc_feature (12)..(12): BNA scaffold modification
  misc_feature (14)..(14): BNA scaffold modification
  misc_feature (20)..(20): BNA scaffold modification
cucaggaauuugugucuuuc

SEQ ID NO: 1896 - RNA, 20 nt, Artificial Sequence
  Antisense oligonucleotide
  misc_feature (1)..(1): BNA scaffold modification
  misc_feature (6)..(6): BNA scaffold modification
  misc_feature (12)..(12): BNA scaffold modification
  misc_feature (14)..(14): BNA scaffold modification
  misc_feature (20)..(20): BNA scaffold modification
cucaggaauuugugucuuuc

SEQ ID NO: 1897 - RNA, 20 nt, Artificial Sequence
  Antisense oligonucleotide
  misc_feature (1)..(1): BNA scaffold modification
  misc_feature (5)..(5): BNA scaffold modification
  misc_feature (14)..(14): BNA scaffold modification
  misc_feature (20)..(20): BNA scaffold modification
cucaggaauuugugucuuuc

SEQ ID NO: 1898 - RNA, 20 nt, Artificial Sequence
  Antisense oligonucleotide
  misc_feature (1)..(2): BNA scaffold modification
  misc_feature (12)..(12): BNA scaffold modification
  misc_feature (19)..(20): BNA scaffold modification
ctcaggaauuugugucuutc

SEQ ID NO: 1899 - RNA, 18 nt, Artificial Sequence
  Antisense oligonucleotide
  misc_feature (1)..(1): BNA scaffold modification
  misc_feature (18)..(18): BNA scaffold modification
auucucaggaauuugugt

SEQ ID NO: 1900 - RNA, 18 nt, Artificial Sequence
  Antisense oligonucleotide
  misc_feature (1)..(1): BNA scaffold modification
  misc_feature (15)..(15): BNA scaffold modification
  misc_feature (18)..(18): BNA scaffold modification
auucucaggaauuugugt

SEQ ID NO: 1901 - RNA, 18 nt, Artificial Sequence
  Antisense oligonucleotide
  misc_feature (1)..(1): BNA scaffold modification
  misc_feature (9)..(9): BNA scaffold modification
  misc_feature (18)..(18): BNA scaffold modification
auucucaggaauuugugt

SEQ ID NO: 1902 - RNA, 18 nt, Artificial Sequence
  Antisense oligonucleotide
  misc_feature (1)..(1): BNA scaffold modification
  misc_feature (8)..(8): BNA scaffold modification
  misc_feature (18)..(18): BNA scaffold modification
auucucaggaauuugugt

SEQ ID NO: 1903 - RNA, 18 nt, Artificial Sequence
  Antisense oligonucleotide
  misc_feature (1)..(1): BNA scaffold modification
  misc_feature (6)..(6): BNA scaffold modification
  misc_feature (18)..(18): BNA scaffold modification
auucucaggaauuugugt

SEQ ID NO: 1904 - RNA, 18 nt, Artificial Sequence
  Antisense oligonucleotide
  misc_feature (1)..(1): BNA scaffold modification
  misc_feature (4)..(4): BNA scaffold modification
  misc_feature (18)..(18): BNA scaffold modification
auucucaggaauuugugt

SEQ ID NO: 1905 - RNA, 18 nt, Artificial Sequence
  Antisense oligonucleotide
  misc_feature (1)..(1): BNA scaffold modification
  misc_feature (4)..(4): BNA scaffold modification
  misc_feature (15)..(15): BNA scaffold modification
  misc_feature (18)..(18): BNA scaffold modification
auucucaggaauuugugt

SEQ ID NO: 1906 - RNA, 18 nt, Artificial Sequence
  Antisense oligonucleotide
  misc_feature (1)..(1): BNA scaffold modification
  misc_feature (4)..(4): BNA scaffold modification
  misc_feature (9)..(9): BNA scaffold modification
  misc_feature (15)..(15): BNA scaffold modification
  misc_feature (18)..(18): BNA scaffold modification
auucucaggaauuugugt

SEQ ID NO: 1907 - RNA, 18 nt, Artificial Sequence
  Antisense oligonucleotide
  misc_feature (1)..(2): BNA scaffold modification
  misc_feature (8)..(9): BNA scaffold modification
  misc_feature (17)..(18): BNA scaffold modification
atucucaggaauuugugt

SEQ ID NO: 1908 - RNA, 18 nt, Artificial Sequence
  Antisense oligonucleotide
  misc_feature (1)..(1): BNA scaffold modification
  misc_feature (9)..(9): BNA scaffold modification
  misc_feature (15)..(15): BNA scaffold modification
  misc_feature (17)..(18): BNA scaffold modification
auucucaggaauuugugt

SEQ ID NO: 1909 - RNA, 18 nt, Artificial Sequence
  Antisense oligonucleotide
  misc_feature (1)..(1): BNA scaffold modification
  misc_feature (4)..(4): BNA scaffold modification
  misc_feature (9)..(9): BNA scaffold modification
  misc_feature (15)..(15): BNA scaffold modification
  misc_feature (17)..(18): BNA scaffold modification
auucucaggaauuugugt

SEQ ID NO: 1910 - RNA, 18 nt, Artificial Sequence
  Antisense oligonucleotide
  misc_feature (1)..(1): BNA scaffold modification
  misc_feature (18)..(18): BNA scaffold modification
tucucaggaauuuguguc

SEQ ID NO: 1911 - RNA, 18 nt, Artificial Sequence
  Antisense oligonucleotide
  misc_feature (1)..(1): BNA scaffold modification
  misc_feature (3)..(3): BNA scaffold modification
  misc_feature (18)..(18): BNA scaffold modification
tucucaggaauuuguguc

SEQ ID NO: 1912 - RNA, 18 nt, Artificial Sequence
  Antisense oligonucleotide
  misc_feature (1)..(1): BNA scaffold modification
  misc_feature (5)..(5): BNA scaffold modification
  misc_feature (18)..(18): BNA scaffold modification
tucucaggaauuuguguc

SEQ ID NO: 1913 - RNA, 18 nt, Artificial Sequence
  Antisense oligonucleotide
  misc_feature (1)..(1): BNA scaffold modification
  misc_feature (7)..(7): BNA scaffold modification
  misc_feature (18)..(18): BNA scaffold modification
tucucaggaauuuguguc

SEQ ID NO: 1914 - RNA, 18 nt, Artificial Sequence
  Antisense oligonucleotide
  misc_feature (1)..(1): BNA scaffold modification
  misc_feature (8)..(8): BNA scaffold modification
  misc_feature (18)..(18): BNA scaffold modification
tucucaggaauuuguguc

SEQ ID NO: 1915 - RNA, 18 nt, Artificial Sequence
  Antisense oligonucleotide
  misc_feature (1)..(1): BNA scaffold modification
  misc_feature (14)..(14): BNA scaffold modification
  misc_feature (18)..(18): BNA scaffold modification
tucucaggaauuuguguc

SEQ ID NO: 1916 - RNA, 18 nt, Artificial Sequence
  Antisense oligonucleotide
  misc_feature (1)..(1): BNA scaffold modification
  misc_feature (16)..(16): BNA scaffold modification
  misc_feature (18)..(18): BNA scaffold modification
tucucaggaauuuguguc

SEQ ID NO: 1917 - RNA, 18 nt, Artificial Sequence
  Antisense oligonucleotide
  misc_feature (1)..(1): BNA scaffold modification
  misc_feature (14)..(14): BNA scaffold modification
  misc_feature (16)..(16): BNA scaffold modification
  misc_feature (18)..(18): BNA scaffold modification
tucucaggaauuuguguc

SEQ ID NO: 1918 - RNA, 18 nt, Artificial Sequence
  Antisense oligonucleotide
  misc_feature (1)..(1): BNA scaffold modification
  misc_feature (3)..(3): BNA scaffold modification
  misc_feature (16)..(16): BNA scaffold modification
  misc_feature (18)..(18): BNA scaffold modification
tucucaggaauuuguguc

SEQ ID NO: 1919 - RNA, 18 nt, Artificial Sequence
  Antisense oligonucleotide
  misc_feature (1)..(1): BNA scaffold modification
  misc_feature (8)..(8): BNA scaffold modification
  misc_feature (14)..(14): BNA scaffold modification
  misc_feature (18)..(18): BNA scaffold modification
tucucaggaauuuguguc

SEQ ID NO: 1920 - RNA, 18 nt, Artificial Sequence
  Antisense oligonucleotide
  misc_feature (1)..(1): BNA scaffold modification
  misc_feature (3)..(3): BNA scaffold modification
  misc_feature (7)..(7): BNA scaffold modification
  misc_feature (14)..(14): BNA scaffold modification
  misc_feature (16)..(16): BNA scaffold modification
  misc_feature (18)..(18): BNA scaffold modification
tucucaggaauuuguguc

SEQ ID NO: 1921 - RNA, 18 nt, Artificial Sequence
  Antisense oligonucleotide
  misc_feature (1)..(2): BNA scaffold modification
  misc_feature (17)..(18): BNA scaffold modification
ttcucaggaauuugugtc

SEQ ID NO: 1922 - RNA, 18 nt, Artificial Sequence
  Antisense oligonucleotide
  misc_feature (1)..(2): BNA scaffold modification
  misc_feature (8)..(8): BNA scaffold modification
  misc_feature (14)..(14): BNA scaffold modification
  misc_feature (17)..(18): BNA scaffold modification
ttcucaggaauuugugtc

SEQ ID NO: 1923 - RNA, 18 nt, Artificial Sequence
  Antisense oligonucleotide
  misc_feature (1)..(1): BNA scaffold modification
  misc_feature (18)..(18): BNA scaffold modification
tcucaggaauuuguguct

SEQ ID NO: 1924 - RNA, 18 nt, Artificial Sequence
  Antisense oligonucleotide
  misc_feature (1)..(1): BNA scaffold modification
  misc_feature (4)..(4): BNA scaffold modification
  misc_feature (18)..(18): BNA scaffold modification
tcucaggaauuuguguct

SEQ ID NO: 1925 - RNA, 18 nt, Artificial Sequence
  Antisense oligonucleotide
  misc_feature (1)..(1): BNA scaffold modification
  misc_feature (6)..(6): BNA scaffold modification
  misc_feature (18)..(18): BNA scaffold modification
tcucaggaauuuguguct

SEQ ID NO: 1926 - RNA, 18 nt, Artificial Sequence
  Antisense oligonucleotide
  misc_feature (1)..(1): BNA scaffold modification
  misc_feature (7)..(7): BNA scaffold modification
  misc_feature (18)..(18): BNA scaffold modification
tcucaggaauuuguguct

SEQ ID NO: 1927 - RNA, 18 nt, Artificial Sequence
  Antisense oligonucleotide
  misc_feature (1)..(1): BNA scaffold modification
  misc_feature (13)..(13): BNA scaffold modification
  misc_feature (18)..(18): BNA scaffold modification
tcucaggaauuuguguct

SEQ ID NO: 1928 - RNA, 18 nt, Artificial Sequence
  Antisense oligonucleotide
  misc_feature (1)..(1): BNA scaffold modification
  misc_feature (15)..(15): BNA scaffold modification
  misc_feature (18)..(18): BNA scaffold modification
tcucaggaauuuguguct

SEQ ID NO: 1929 - RNA, 18 nt, Artificial Sequence
  Antisense oligonucleotide
  misc_feature (1)..(1): BNA scaffold modification
  misc_feature (6)..(6): BNA scaffold modification
  misc_feature (15)..(15): BNA scaffold modification
  misc_feature (18)..(18): BNA scaffold modification
tcucaggaauuuguguct

SEQ ID NO: 1930 - RNA, 18 nt, Artificial Sequence
  Antisense oligonucleotide
  misc_feature (1)..(2): BNA scaffold modification
  misc_feature (4)..(4): BNA scaffold modification
  misc_feature (17)..(18): BNA scaffold modification
tcucaggaauuuguguct

SEQ ID NO: 1931 - RNA, 18 nt, Artificial Sequence
  Antisense oligonucleotide
  misc_feature (1)..(1): BNA scaffold modification
  misc_feature (13)..(13): BNA scaffold modification
  misc_feature (15)..(15): BNA scaffold modification
  misc_feature (18)..(18): BNA scaffold modification
tcucaggaauuuguguct

SEQ ID NO: 1932 - RNA, 18 nt, Artificial Sequence
  Antisense oligonucleotide
  misc_feature (1)..(1): BNA scaffold modification
  misc_feature (6)..(6): BNA scaffold modification
  misc_feature (13)..(13): BNA scaffold modification
  misc_feature (15)..(15): BNA scaffold modification
  misc_feature (18)..(18): BNA scaffold modification
tcucaggaauuuguguct

SEQ ID NO: 1933 - RNA, 18 nt, Artificial Sequence
  Antisense oligonucleotide
  misc_feature (1)..(2): BNA scaffold modification
  misc_feature (7)..(7): BNA scaffold modification
  misc_feature (13)..(13): BNA scaffold modification
  misc_feature (17)..(18): BNA scaffold modification
tcucaggaauuuguguct

SEQ ID NO: 1934 - RNA, 18 nt, Artificial Sequence
  Antisense oligonucleotide
  misc_feature (1)..(1): BNA scaffold modification
  misc_feature (18)..(18): BNA scaffold modification
cucaggaauuugugucut

SEQ ID NO: 1935 - RNA, 18 nt, Artificial Sequence
  Antisense oligonucleotide
  misc_feature (1)..(1): BNA scaffold modification
  misc_feature (3)..(3): BNA scaffold modification
  misc_feature (18)..(18): BNA scaffold modification
cucaggaauuugugucut

SEQ ID NO: 1936 - RNA, 18 nt, Artificial Sequence
  Antisense oligonucleotide
  misc_feature (1)..(1): BNA scaffold modification
  misc_feature (5)..(5): BNA scaffold modification
  misc_feature (18)..(18): BNA scaffold modification
cucaggaauuugugucut

SEQ ID NO: 1937 - RNA, 18 nt, Artificial Sequence
  Antisense oligonucleotide
  misc_feature (1)..(1): BNA scaffold modification
  misc_feature (6)..(6): BNA scaffold modification
  misc_feature (12)..(12): BNA scaffold modification
  misc_feature (18)..(18): BNA scaffold modification
cucaggaauuugugucut

SEQ ID NO: 1938 - RNA, 18 nt, Artificial Sequence
  Antisense oligonucleotide
  misc_feature (1)..(1): BNA scaffold modification
  misc_feature (14)..(14): BNA scaffold modification
  misc_feature (18)..(18): BNA scaffold modification
cucaggaauuugugucut

SEQ ID NO: 1939 - RNA, 18 nt, Artificial Sequence
  Antisense oligonucleotide
  misc_feature (1)..(1): BNA scaffold modification
  misc_feature (16)..(16): BNA scaffold modification
  misc_feature (18)..(18): BNA scaffold modification
cucaggaauuugugucut

SEQ ID NO: 1940 - RNA, 18 nt, Artificial Sequence
  Antisense oligonucleotide
  misc_feature (1)..(1): BNA scaffold modification
  misc_feature (3)..(3): BNA scaffold modification
  misc_feature (16)..(16): BNA scaffold modification
  misc_feature (18)..(18): BNA scaffold modification
cucaggaauuugugucut

SEQ ID NO: 1941 - RNA, 18 nt, Artificial Sequence
  Antisense oligonucleotide
  misc_feature (1)..(1): BNA scaffold modification
  misc_feature (5)..(5): BNA scaffold modification
  misc_feature (11)..(12): BNA scaffold modification
  misc_feature (14)..(14): BNA scaffold modification
  misc_feature (18)..(18): BNA scaffold modification
cucaggaauuugugucut

SEQ ID NO: 1942 - RNA, 18 nt, Artificial Sequence
  Antisense oligonucleotide
  misc_feature (1)..(1): BNA scaffold modification
  misc_feature (3)..(3): BNA scaffold modification
  misc_feature (6)..(6): BNA scaffold modification
  misc_feature (12)..(12): BNA scaffold modification
  misc_feature (16)..(16): BNA scaffold modification
  misc_feature (18)..(18): BNA scaffold modification
cucaggaauuugugucut

SEQ ID NO: 1943 - RNA, 18 nt, Artificial Sequence
  Antisense oligonucleotide
  misc_feature (1)..(1): BNA scaffold modification
  misc_feature (5)..(6): BNA scaffold modification
  misc_feature (12)..(12): BNA scaffold modification
  misc_feature (14)..(14): BNA scaffold modification
  misc_feature (18)..(18): BNA scaffold modification
cucaggaauuugugucut

SEQ ID NO: 1944 - RNA, 18 nt, Artificial Sequence
  Antisense oligonucleotide
  misc_feature (1)..(2): BNA scaffold modification
  misc_feature (6)..(6): BNA scaffold modification
  misc_feature (12)..(12): BNA scaffold modification
  misc_feature (17)..(18): BNA scaffold modification
ctcaggaauuuguguctt

SEQ ID NO: 1945 - RNA, 18 nt, Artificial Sequence
  Antisense oligonucleotide
  misc_feature (1)..(1): BNA scaffold modification
  misc_feature (18)..(18): BNA scaffold modification
tcaggaauuugugucuut

SEQ ID NO: 1946 - RNA, 18 nt, Artificial Sequence
  Antisense oligonucleotide
  misc_feature (1)..(1): BNA scaffold modification
  misc_feature (4)..(4): BNA scaffold modification
  misc_feature (18)..(18): BNA scaffold modification
tcaggaauuugugucuut

SEQ ID NO: 1947 - RNA, 18 nt, Artificial Sequence
  Antisense oligonucleotide
  misc_feature (1)..(1): BNA scaffold modification
  misc_feature (5)..(5): BNA scaffold modification
  misc_feature (18)..(18): BNA scaffold modification
tcaggaauuugugucuut

SEQ ID NO: 1948 - RNA, 18 nt, Artificial Sequence
  Antisense oligonucleotide
  misc_feature (1)..(1): BNA scaffold modification
  misc_feature (11)..(11): BNA scaffold modification
  misc_feature (18)..(18): BNA scaffold modification
tcaggaauuugugucuut

SEQ ID NO: 1949 - RNA, 18 nt, Artificial Sequence
  Antisense oligonucleotide
  misc_feature (1)..(1): BNA scaffold modification
  misc_feature (13)..(13): BNA scaffold modification
  misc_feature (18)..(18): BNA scaffold modification
tcaggaauuugugucuut

SEQ ID NO: 1950 - RNA, 18 nt, Artificial Sequence
  Antisense oligonucleotide
  misc_feature (1)..(1): BNA scaffold modification
  misc_feature (15)..(15): BNA scaffold modification
  misc_feature (18)..(18): BNA scaffold modification
tcaggaauuugugucuut

SEQ ID NO: 1951 - RNA, 18 nt, Artificial Sequence
  Antisense oligonucleotide
  misc_feature (1)..(2): BNA scaffold modification
  misc_feature (15)..(15): BNA scaffold modification
  misc_feature (18)..(18): BNA scaffold modification
tcaggaauuugugucuut

SEQ ID NO: 1952 - RNA, 18 nt, Artificial Sequence
  Antisense oligonucleotide
  misc_feature (1)..(1): BNA scaffold modification
  misc_feature (11)..(11): BNA scaffold modification
  misc_feature (13)..(13): BNA scaffold modification
  misc_feature (18)..(18): BNA scaffold modification
tcaggaauuugugucuut

SEQ ID NO: 1953 - RNA, 18 nt, Artificial Sequence
  Antisense oligonucleotide
  misc_feature (1)..(1): BNA scaffold modification
  misc_feature (4)..(4): BNA scaffold modification
  misc_feature (11)..(11): BNA scaffold modification
  misc_feature (13)..(13): BNA scaffold modification
  misc_feature (18)..(18): BNA scaffold modification
tcaggaauuugugucuut

SEQ ID NO: 1954 - RNA, 18 nt, Artificial Sequence
  Antisense oligonucleotide
  misc_feature (1)..(2): BNA scaffold modification
  misc_feature (11)..(11): BNA scaffold modification
  misc_feature (17)..(18): BNA scaffold modification
tcaggaauuugugucutt

SEQ ID NO: 1955 - RNA, 18 nt, Artificial Sequence
  Antisense oligonucleotide
  misc_feature (1)..(1): BNA scaffold modification
  misc_feature (5)..(5): BNA scaffold modification
  misc_feature (11)..(11): BNA scaffold modification
  misc_feature (13)..(13): BNA scaffold modification
  misc_feature (15)..(15): BNA scaffold modification
  misc_feature (18)..(18): BNA scaffold modification
tcaggaauuugugucuut

SEQ ID NO: 1956 - RNA, 18 nt, Artificial Sequence
  Antisense oligonucleotide
  misc_feature (1)..(1): BNA scaffold modification
  misc_feature (18)..(18): BNA scaffold modification
caggaauuugugucuuuc

SEQ ID NO: 1957 - RNA, 18 nt, Artificial Sequence
  Antisense oligonucleotide
  misc_feature (1)..(1): BNA scaffold modification
  misc_feature (14)..(14): BNA scaffold modification
  misc_feature (18)..(18): BNA scaffold modification
caggaauuugugucuuuc

SEQ ID NO: 1958 - RNA, 18 nt, Artificial Sequence
  Antisense oligonucleotide
  misc_feature (1)..(1): BNA scaffold modification
  misc_feature (12)..(12): BNA scaffold modification
  misc_feature (18)..(18): BNA scaffold modification
caggaauuugugucuuuc

SEQ ID NO: 1959 - RNA, 18 nt, Artificial Sequence
  Antisense oligonucleotide
  misc_feature (1)..(1): BNA scaffold modification
  misc_feature (10)..(10): BNA scaffold modification
  misc_feature (18)..(18): BNA scaffold modification
caggaauuugugucuuuc

SEQ ID NO: 1960 - RNA, 18 nt, Artificial Sequence
  Antisense oligonucleotide
  misc_feature (1)..(1): BNA scaffold modification
  misc_feature (4)..(4): BNA scaffold modification
  misc_feature (18)..(18): BNA scaffold modification
caggaauuugugucuuuc

SEQ ID NO: 1961 - RNA, 18 nt, Artificial Sequence
  Antisense oligonucleotide
  misc_feature (1)..(1): BNA scaffold modification
  misc_feature (3)..(3): BNA scaffold modification
  misc_feature (18)..(18): BNA scaffold modification
caggaauuugugucuuuc

SEQ ID NO: 1962 - RNA, 18 nt, Artificial Sequence
  Antisense oligonucleotide
  misc_feature (1)..(1): BNA scaffold modification
  misc_feature (3)..(3): BNA scaffold modification
  misc_feature (14)..(14): BNA scaffold modification
  misc_feature (18)..(18): BNA scaffold modification
caggaauuugugucuuuc

SEQ ID NO: 1963 - RNA, 18 nt, Artificial Sequence
  Antisense oligonucleotide
  misc_feature (1)..(1): BNA scaffold modification
  misc_feature (4)..(4): BNA scaffold modification
  misc_feature (10)..(10): BNA scaffold modification
  misc_feature (14)..(14): BNA scaffold modification
  misc_feature (18)..(18): BNA scaffold modification
caggaauuugugucuuuc

SEQ ID NO: 1964 - RNA, 18 nt, Artificial Sequence
  Antisense oligonucleotide
  misc_feature (1)..(1): BNA scaffold modification
  misc_feature (10)..(10): BNA scaffold modification
  misc_feature (12)..(12): BNA scaffold modification
  misc_feature (17)..(18): BNA scaffold modification
caggaauuugugucuutc

SEQ ID NO: 1965 - RNA, 18 nt, Artificial Sequence
  Antisense oligonucleotide
  misc_feature (1)..(1): BNA scaffold modification
  misc_feature (4)..(4): BNA scaffold modification
  misc_feature (10)..(10): BNA scaffold modification
  misc_feature (14)..(14): BNA scaffold modification
  misc_feature (18)..(18): BNA scaffold modification
caggaauuugugucuuuc

SEQ ID NO: 1966 - RNA, 18 nt, Artificial Sequence
  Antisense oligonucleotide
  misc_feature (1)..(2): BNA scaffold modification
  misc_feature (10)..(10): BNA scaffold modification
  misc_feature (12)..(12): BNA scaffold modification
  misc_feature (17)..(18): BNA scaffold modification
caggaauuugugucuutc

SEQ ID NO: 1967 - RNA, 16 nt, Artificial Sequence
  Antisense oligonucleotide
  misc_feature (1)..(1): BNA scaffold modification
  misc_feature (16)..(16): BNA scaffold modification
auucucaggaauuugt

SEQ ID NO: 1968 - RNA, 16 nt, Artificial Sequence
  Antisense oligonucleotide
  misc_feature (1)..(1): BNA scaffold modification
  misc_feature (15)..(16): BNA scaffold modification
auucucaggaauuugt

SEQ ID NO: 1969 - RNA, 16 nt, Artificial Sequence
  Antisense oligonucleotide
  misc_feature (1)..(1): BNA scaffold modification
  misc_feature (9)..(9): BNA scaffold modification
  misc_feature (16)..(16): BNA scaffold modification
auucucaggaauuugt

SEQ ID NO: 1970 - RNA, 16 nt, Artificial Sequence
  Antisense oligonucleotide
  misc_feature (1)..(1): BNA scaffold modification
  misc_feature (8)..(8): BNA scaffold modification
  misc_feature (16)..(16): BNA scaffold modification
auucucaggaauuugt

SEQ ID NO: 1971 - RNA, 16 nt, Artificial Sequence
  Antisense oligonucleotide
  misc_feature (1)..(1): BNA scaffold modification
  misc_feature (6)..(6): BNA scaffold modification
  misc_feature (16)..(16): BNA scaffold modification
auucucaggaauuugt

SEQ ID NO: 1972 - RNA, 16 nt, Artificial Sequence
  Antisense oligonucleotide
  misc_feature (1)..(1): BNA scaffold modification
  misc_feature (4)..(4): BNA scaffold modification
  misc_feature (16)..(16): BNA scaffold modification
auucucaggaauuugt

SEQ ID NO: 1973 - RNA, 16 nt, Artificial Sequence
  Antisense oligonucleotide
  misc_feature (1)..(1): BNA scaffold modification
  misc_feature (9)..(9): BNA scaffold modification
  misc_feature (15)..(16): BNA scaffold modification
auucucaggaauuugt

SEQ ID NO: 1974 - RNA, 16 nt, Artificial Sequence
  Antisense oligonucleotide
  misc_feature (1)..(1): BNA scaffold modification
  misc_feature (4)..(4): BNA scaffold modification
  misc_feature (6)..(6): BNA scaffold modification
  misc_feature (16)..(16): BNA scaffold modification
auucucaggaauuugt

SEQ ID NO: 1975 - RNA, 16 nt, Artificial Sequence
  Antisense oligonucleotide
  misc_feature (1)..(1): BNA scaffold modification
  misc_feature (8)..(9): BNA scaffold modification
  misc_feature (15)..(16): BNA scaffold modification
auucucaggaauuugt

SEQ ID NO: 1976 - RNA, 16 nt, Artificial Sequence
  Antisense oligonucleotide
  misc_feature (1)..(1): BNA scaffold modification
  misc_feature (4)..(4): BNA scaffold modification
  misc_feature (9)..(9): BNA scaffold modification
  misc_feature (16)..(16): BNA scaffold modification
auucucaggaauuugt

SEQ ID NO: 1977 - RNA, 16 nt, Artificial Sequence
  Antisense oligonucleotide
  misc_feature (1)..(2): BNA scaffold modification
  misc_feature (8)..(9): BNA scaffold modification
  misc_feature (15)..(16): BNA scaffold modification
atucucaggaauuugt

SEQ ID NO: 1978 - RNA, 16 nt, Artificial Sequence
  Antisense oligonucleotide
  misc_feature (1)..(1): BNA scaffold modification
  misc_feature (16)..(16): BNA scaffold modification
tucucaggaauuugug

SEQ ID NO: 1979 - RNA, 16 nt, Artificial Sequence
  Antisense oligonucleotide
  misc_feature (1)..(1): BNA scaffold modification
  misc_feature (14)..(14): BNA scaffold modification
  misc_feature (16)..(16): BNA scaffold modification
tucucaggaauuugug

SEQ ID NO: 1980 - RNA, 16 nt, Artificial Sequence
  Antisense oligonucleotide
  misc_feature (1)..(1): BNA scaffold modification
  misc_feature (8)..(8): BNA scaffold modification
  misc_feature (16)..(16): BNA scaffold modification
tucucaggaauuugug

SEQ ID NO: 1981 - RNA, 16 nt, Artificial Sequence
  Antisense oligonucleotide
  misc_feature (1)..(1): BNA scaffold modification
  misc_feature (7)..(7): BNA scaffold modification
  misc_feature (16)..(16): BNA scaffold modification
tucucaggaauuugug

SEQ ID NO: 1982 - RNA, 16 nt, Artificial Sequence
  Antisense oligonucleotide
  misc_feature (1)..(1): BNA scaffold modification
  misc_feature (5)..(5): BNA scaffold modification
  misc_feature (16)..(16): BNA scaffold modification
tucucaggaauuugug

SEQ ID NO: 1983 - RNA, 16 nt, Artificial Sequence
  Antisense oligonucleotide
  misc_feature (1)..(1): BNA scaffold modification
  misc_feature (3)..(3): BNA scaffold modification
  misc_feature (16)..(16): BNA scaffold modification
tucucaggaauuugug

SEQ ID NO: 1984 - RNA, 16 nt, Artificial Sequence
  Antisense oligonucleotide
  misc_feature (1)..(1): BNA scaffold modification
  misc_feature (3)..(3): BNA scaffold modification
  misc_feature (5)..(5): BNA scaffold modification
  misc_feature (16)..(16): BNA scaffold modification
tucucaggaauuugug

SEQ ID NO: 1985 - RNA, 16 nt, Artificial Sequence
  Antisense oligonucleotide
  misc_feature (1)..(1): BNA scaffold modification
  misc_feature (8)..(8): BNA scaffold modification
  misc_feature (14)..(14): BNA scaffold modification
  misc_feature (16)..(16): BNA scaffold modification
tucucaggaauuugug

SEQ ID NO: 1986 - RNA, 16 nt, Artificial Sequence
  Antisense oligonucleotide
  misc_feature (1)..(1): BNA scaffold modification
  misc_feature (3)..(3): BNA scaffold modification
  misc_feature (7)..(7): BNA scaffold modification
  misc_feature (14)..(14): BNA scaffold modification
  misc_feature (16)..(16): BNA scaffold modification
tucucaggaauuugug

SEQ ID NO: 1987 - RNA, 16 nt, Artificial Sequence
  Antisense oligonucleotide
  misc_feature (1)..(1): BNA scaffold modification
  misc_feature (3)..(3): BNA scaffold modification
  misc_feature (8)..(8): BNA scaffold modification
  misc_feature (15)..(16): BNA scaffold modification
tucucaggaauuugtg

SEQ ID NO: 1988 - RNA, 16 nt, Artificial Sequence
  Antisense oligonucleotide
  misc_feature (1)..(1): BNA scaffold modification
  misc_feature (16)..(16): BNA scaffold modification
tcucaggaauuugugt

SEQ ID NO: 1989 - RNA, 16 nt, Artificial Sequence
  Antisense oligonucleotide
  misc_feature (1)..(1): BNA scaffold modification
  misc_feature (15)..(16): BNA scaffold modification
tcucaggaauuugugt

SEQ ID NO: 1990 - RNA, 16 nt, Artificial Sequence
  Antisense oligonucleotide
  misc_feature (1)..(1): BNA scaffold modification
  misc_feature (13)..(13): BNA scaffold modification
  misc_feature (16)..(16): BNA scaffold modification
tcucaggaauuugugt

SEQ ID NO: 1991 - RNA, 16 nt, Artificial Sequence
  Antisense oligonucleotide
  misc_feature (1)..(1): BNA scaffold modification
  misc_feature (7)..(7): BNA scaffold modification
  misc_feature (16)..(16): BNA scaffold modification
tcucaggaauuugugt

SEQ ID NO: 1992 - RNA, 16 nt, Artificial Sequence
  Antisense oligonucleotide
  misc_feature (1)..(1): BNA scaffold modification
  misc_feature (6)..(6): BNA scaffold modification
  misc_feature (16)..(16): BNA scaffold modification
tcucaggaauuugugt

SEQ ID NO: 1993 - RNA, 16 nt, Artificial Sequence
  Antisense oligonucleotide
  misc_feature (1)..(1): BNA scaffold modification
  misc_feature (4)..(4): BNA scaffold modification
  misc_feature (16)..(16): BNA scaffold modification
tcucaggaauuugugt

SEQ ID NO: 1994 - RNA, 16 nt, Artificial Sequence
  Antisense oligonucleotide
  misc_feature (1)..(2): BNA scaffold modification
  misc_feature (16)..(16): BNA scaffold modification
tcucaggaauuugugt

SEQ ID NO: 1995 - RNA, 16 nt, Artificial Sequence
  Antisense oligonucleotide
  misc_feature (1)..(2): BNA scaffold modification
  misc_feature (4)..(4): BNA scaffold modification
  misc_feature (16)..(16): BNA scaffold modification
tcucaggaauuugugt

SEQ ID NO: 1996 - RNA, 16 nt, Artificial Sequence
  Antisense oligonucleotide
  misc_feature (1)..(1): BNA scaffold modification
  misc_feature (13)..(13): BNA scaffold modification
  misc_feature (15)..(16): BNA scaffold modification
tcucaggaauuugugt

SEQ ID NO: 1997 - RNA, 16 nt, Artificial Sequence
  Antisense oligonucleotide
  misc_feature (1)..(1): BNA scaffold modification
  misc_feature (7)..(7): BNA scaffold modification
  misc_feature (13)..(13): BNA scaffold modification
  misc_feature (15)..(16): BNA scaffold modification
tcucaggaauuugugt

SEQ ID NO: 1998 - RNA, 16 nt, Artificial Sequence
  Antisense oligonucleotide
  misc_feature (1)..(1): BNA scaffold modification
  misc_feature (6)..(7): BNA scaffold modification
  misc_feature (13)..(13): BNA scaffold modification
  misc_feature (15)..(16): BNA scaffold modification
tcucaggaauuugugt

SEQ ID NO: 1999 - RNA, 16 nt, Artificial Sequence
  Antisense oligonucleotide
  misc_feature (1)..(1): BNA scaffold modification
  misc_feature (4)..(4): BNA scaffold modification
  misc_feature (7)..(7): BNA scaffold modification
  misc_feature (13)..(13): BNA scaffold modification
  misc_feature (16)..(16): BNA scaffold modification
tcucaggaauuugugt

SEQ ID NO: 2000 - RNA, 16 nt, Artificial Sequence
  Antisense oligonucleotide
  misc_feature (1)..(1): BNA scaffold modification
  misc_feature (16)..(16): BNA scaffold modification
cucaggaauuuguguc

SEQ ID NO: 2001 - RNA, 16 nt, Artificial Sequence
  Antisense oligonucleotide
  misc_feature (1)..(1): BNA scaffold modification
  misc_feature (14)..(14): BNA scaffold modification
  misc_feature (16)..(16): BNA scaffold modification
cucaggaauuuguguc

SEQ ID NO: 2002 - RNA, 16 nt, Artificial Sequence
  Antisense oligonucleotide
  misc_feature (1)..(1): BNA scaffold modification
  misc_feature (12)..(12): BNA scaffold modification
  misc_feature (16)..(16): BNA scaffold modification
cucaggaauuuguguc

SEQ ID NO: 2003 - RNA, 16 nt, Artificial Sequence
  Antisense oligonucleotide
  misc_feature (1)..(1): BNA scaffold modification
  misc_feature (6)..(6): BNA scaffold modification
  misc_feature (16)..(16): BNA scaffold modification
cucaggaauuuguguc

SEQ ID NO: 2004 - RNA, 16 nt, Artificial Sequence
  Antisense oligonucleotide
  misc_feature (1)..(1): BNA scaffold modification
  misc_feature (5)..(5): BNA scaffold modification
  misc_feature (16)..(16): BNA scaffold modification
cucaggaauuuguguc

SEQ ID NO: 2005 - RNA, 16 nt, Artificial Sequence
  Antisense oligonucleotide
  misc_feature (1)..(1): BNA scaffold modification
  misc_feature (3)..(3): BNA scaffold modification
  misc_feature (16)..(16): BNA scaffold modification
cucaggaauuuguguc

SEQ ID NO: 2006 - RNA, 16 nt, Artificial Sequence
  Antisense oligonucleotide
  misc_feature (1)..(1): BNA scaffold modification
  misc_feature (3)..(3): BNA scaffold modification
  misc_feature (14)..(14): BNA scaffold modification
  misc_feature (16)..(16): BNA scaffold modification
cucaggaauuuguguc

SEQ ID NO: 2007 - RNA, 16 nt, Artificial Sequence
  Antisense oligonucleotide
  misc_feature (1)..(1): BNA scaffold modification
  misc_feature (5)..(5): BNA scaffold modification
  misc_feature (12)..(12): BNA scaffold modification
  misc_feature (14)..(14): BNA scaffold modification
  misc_feature (16)..(16): BNA scaffold modification
cucaggaauuuguguc

SEQ ID NO: 2008 - RNA, 16 nt, Artificial Sequence
  Antisense oligonucleotide
  misc_feature (1)..(2): BNA scaffold modification
  misc_feature (15)..(16): BNA scaffold modification
ctcaggaauuugugtc

SEQ ID NO: 2009 - RNA, 16 nt, Artificial Sequence
  Antisense oligonucleotide
  misc_feature (1)..(1): BNA scaffold modification
  misc_feature (3)..(3): BNA scaffold modification
  misc_feature (12)..(12): BNA scaffold modification
  misc_feature (14)..(14): BNA scaffold modification
  misc_feature (16)..(16): BNA scaffold modification
cucaggaauuuguguc

SEQ ID NO: 2010 - RNA, 16 nt, Artificial Sequence
  Antisense oligonucleotide
  misc_feature (1)..(1): BNA scaffold modification
  misc_feature (3)..(3): BNA scaffold modification
  misc_feature (6)..(6): BNA scaffold modification
  misc_feature (12)..(12): BNA scaffold modification
  misc_feature (14)..(14): BNA scaffold modification
  misc_feature (16)..(16): BNA scaffold modification
cucaggaauuuguguc

SEQ ID NO: 2011 - RNA, 16 nt, Artificial Sequence
  Antisense oligonucleotide
  misc_feature (1)..(1): BNA scaffold modification
  misc_feature (16)..(16): BNA scaffold modification
tcaggaauuuguguct

SEQ ID NO: 2012 - RNA, 16 nt, Artificial Sequence
  Antisense oligonucleotide
  misc_feature (1)..(2): BNA scaffold modification
  misc_feature (16)..(16): BNA scaffold modification
tcaggaauuuguguct

SEQ ID NO: 2013 - RNA, 16 nt, Artificial Sequence
  Antisense oligonucleotide
  misc_feature (1)..(1): BNA scaffold modification
  misc_feature (4)..(4): BNA scaffold modification
  misc_feature (16)..(16): BNA scaffold modification
tcaggaauuuguguct

SEQ ID NO: 2014 - RNA, 16 nt, Artificial Sequence
  Antisense oligonucleotide
  misc_feature (1)..(1): BNA scaffold modification
  misc_feature (5)..(5): BNA scaffold modification
  misc_feature (16)..(16): BNA scaffold modification
tcaggaauuuguguct

SEQ ID NO: 2015 - RNA, 16 nt, Artificial Sequence
  Antisense oligonucleotide
  misc_feature (1)..(1): BNA scaffold modification
  misc_feature (11)..(11): BNA scaffold modification
  misc_feature (16)..(16): BNA scaffold modification
tcaggaauuuguguct

SEQ ID NO: 2016 - RNA, 16 nt, Artificial Sequence
  Antisense oligonucleotide
  misc_feature (1)..(1): BNA scaffold modification
  misc_feature (13)..(13): BNA scaffold modification
  misc_feature (16)..(16): BNA scaffold modification
tcaggaauuuguguct

SEQ ID NO: 2017 - RNA, 16 nt, Artificial Sequence
  Antisense oligonucleotide
  misc_feature (1)..(1): BNA scaffold modification
  misc_feature (15)..(16): BNA scaffold modification
tcaggaauuuguguct

SEQ ID NO: 2018 - RNA, 16 nt, Artificial Sequence
  Antisense oligonucleotide
  misc_feature (1)..(2): BNA scaffold modification
  misc_feature (15)..(16): BNA scaffold modification
tcaggaauuuguguct

SEQ ID NO: 2019 - RNA, 16 nt, Artificial Sequence
  Antisense oligonucleotide
  misc_feature (1)..(1): BNA scaffold modification
  misc_feature (4)..(4): BNA scaffold modification
  misc_feature (13)..(13): BNA scaffold modification
  misc_feature (16)..(16): BNA scaffold modification
tcaggaauuuguguct

SEQ ID NO: 2020 - RNA, 16 nt, Artificial Sequence
  Antisense oligonucleotide
  misc_feature (1)..(1): BNA scaffold modification
  misc_feature (11)..(11): BNA scaffold modification
  misc_feature (13)..(13): BNA scaffold modification
  misc_feature (16)..(16): BNA scaffold modification
tcaggaauuuguguct

SEQ ID NO: 2021 - RNA, 16 nt, Artificial Sequence
  Antisense oligonucleotide
  misc_feature (1)..(1): BNA scaffold modification
  misc_feature (4)..(5): BNA scaffold modification
  misc_feature (11)..(11): BNA scaffold modification
  misc_feature (13)..(13): BNA scaffold modification
  misc_feature (16)..(16): BNA scaffold modification
tcaggaauuuguguct

SEQ ID NO: 2022 - RNA, 16 nt, Artificial Sequence
  Antisense oligonucleotide
  misc_feature (1)..(1): BNA scaffold modification
  misc_feature (16)..(16): BNA scaffold modification
caggaauuugugucut

SEQ ID NO: 2023 - RNA, 16 nt, Artificial Sequence
  Antisense oligonucleotide
  misc_feature (1)..(1): BNA scaffold modification
  misc_feature (3)..(3): BNA scaffold modification
  misc_feature (16)..(16): BNA scaffold modification
caggaauuugugucut

SEQ ID NO: 2024 - RNA, 16 nt, Artificial Sequence
  Antisense oligonucleotide
  misc_feature (1)..(1): BNA scaffold modification
  misc_feature (4)..(4): BNA scaffold modification
  misc_feature (16)..(16): BNA scaffold modification
caggaauuugugucut

SEQ ID NO: 2025 - RNA, 16 nt, Artificial Sequence
  Antisense oligonucleotide
  misc_feature (1)..(1): BNA scaffold modification
  misc_feature (10)..(10): BNA scaffold modification
  misc_feature (16)..(16): BNA scaffold modification
caggaauuugugucut

SEQ ID NO: 2026 - RNA, 16 nt, Artificial Sequence
  Antisense oligonucleotide
  misc_feature (1)..(1): BNA scaffold modification
  misc_feature (12)..(12): BNA scaffold modification
  misc_feature (16)..(16): BNA scaffold modification
caggaauuugugucut

SEQ ID NO: 2027 - RNA, 16 nt, Artificial Sequence
  Antisense oligonucleotide
  misc_feature (1)..(1): BNA scaffold modification
  misc_feature (14)..(14): BNA scaffold modification
  misc_feature (16)..(16): BNA scaffold modification
caggaauuugugucut

SEQ ID NO: 2028 - RNA, 16 nt, Artificial Sequence
  Antisense oligonucleotide
  misc_feature (1)..(1): BNA scaffold modification
  misc_feature (4)..(4): BNA scaffold modification
  misc_feature (10)..(10): BNA scaffold modification
  misc_feature (16)..(16): BNA scaffold modification
caggaauuugugucut

SEQ ID NO: 2029 - RNA, 16 nt, Artificial Sequence
  Antisense oligonucleotide
  misc_feature (1)..(1): BNA scaffold modification
  misc_feature (10)..(10): BNA scaffold modification
  misc_feature (12)..(12): BNA scaffold modification
  misc_feature (16)..(16): BNA scaffold modification
caggaauuugugucut

SEQ ID NO: 2030 - RNA, 16 nt, Artificial Sequence
  Antisense oligonucleotide
  misc_feature (1)..(1): BNA scaffold modification
  misc_feature (10)..(10): BNA scaffold modification
  misc_feature (12)..(12): BNA scaffold modification
  misc_feature (14)..(14): BNA scaffold modification
  misc_feature (16)..(16): BNA scaffold modification
caggaauuugugucut

SEQ ID NO: 2031 - RNA, 16 nt, Artificial Sequence
  Antisense oligonucleotide
  misc_feature (1)..(1): BNA scaffold modification
  misc_feature (3)..(4): BNA scaffold modification
  misc_feature (10)..(10): BNA scaffold modification
  misc_feature (12)..(12): BNA scaffold modification
  misc_feature (16)..(16): BNA scaffold modification
caggaauuugugucut

SEQ ID NO: 2032 - RNA, 16 nt, Artificial Sequence
  Antisense oligonucleotide
  misc_feature (1)..(2): BNA scaffold modification
  misc_feature (4)..(4): BNA scaffold modification
  misc_feature (10)..(10): BNA scaffold modification
  misc_feature (15)..(16): BNA scaffold modification
caggaauuuguguctt

SEQ ID NO: 2033 - RNA, 16 nt, Artificial Sequence
  Antisense oligonucleotide
  misc_feature (1)..(1): BNA scaffold modification
  misc_feature (16)..(16): BNA scaffold modification
aggaauuugugucuut

SEQ ID NO: 2034 - RNA, 16 nt, Artificial Sequence
  Antisense oligonucleotide
  misc_feature (1)..(1): BNA scaffold modification
  misc_feature (13)..(13): BNA scaffold modification
  misc_feature (16)..(16): BNA scaffold modification
aggaauuugugucuut

SEQ ID NO: 2035 - RNA, 16 nt, Artificial Sequence
  Antisense oligonucleotide
  misc_feature (1)..(1): BNA scaffold modification
  misc_feature (11)..(11): BNA scaffold modification
  misc_feature (16)..(16): BNA scaffold modification
aggaauuugugucuut

SEQ ID NO: 2036 - RNA, 16 nt, Artificial Sequence
  Antisense oligonucleotide
  misc_feature (1)..(1): BNA scaffold modification
  misc_feature (9)..(9): BNA scaffold modification
  misc_feature (16)..(16): BNA scaffold modification
aggaauuugugucuut

SEQ ID NO: 2037 - RNA, 16 nt, Artificial Sequence
  Antisense oligonucleotide
  misc_feature (1)..(1): BNA scaffold modification
  misc_feature (3)..(3): BNA scaffold modification
  misc_feature (16)..(16): BNA scaffold modification
aggaauuugugucuut

SEQ ID NO: 2038 - RNA, 16 nt, Artificial Sequence
  Antisense oligonucleotide
  misc_feature (1)..(2): BNA scaffold modification
  misc_feature (16)..(16): BNA scaffold modification
aggaauuugugucuut

SEQ ID NO: 2039 - RNA, 16 nt, Artificial Sequence
  Antisense oligonucleotide
  misc_feature (1)..(1): BNA scaffold modification
  misc_feature (3)..(3): BNA scaffold modification
  misc_feature (11)..(11): BNA scaffold modification
  misc_feature (16)..(16): BNA scaffold modification
aggaauuugugucuut

SEQ ID NO: 2040 - RNA, 16 nt, Artificial Sequence
  Antisense oligonucleotide
  misc_feature (1)..(1): BNA scaffold modification
  misc_feature (9)..(9): BNA scaffold modification
  misc_feature (11)..(11): BNA scaffold modification
  misc_feature (16)..(16): BNA scaffold modification
aggaauuugugucuut

SEQ ID NO: 2041 - RNA, 16 nt, Artificial Sequence
  Antisense oligonucleotide
  misc_feature (1)..(1): BNA scaffold modification
  misc_feature (3)..(3): BNA scaffold modification
  misc_feature (9)..(9): BNA scaffold modification
  misc_feature (11)..(11): BNA scaffold modification
  misc_feature (16)..(16): BNA scaffold modification
aggaauuugugucuut

SEQ ID NO: 2042 - RNA, 16 nt, Artificial Sequence
  Antisense oligonucleotide
  misc_feature (1)..(1): BNA scaffold modification
  misc_feature (3)..(3): BNA scaffold modification
  misc_feature (9)..(9): BNA scaffold modification
  misc_feature (13)..(13): BNA scaffold modification
  misc_feature (16)..(16): BNA scaffold modification
aggaauuugugucuut

SEQ ID NO: 2043 - RNA, 16 nt, Artificial Sequence
  Antisense oligonucleotide
  misc_feature (1)..(2): BNA scaffold modification
  misc_feature (9)..(9): BNA scaffold modification
  misc_feature (11)..(11): BNA scaffold modification
  misc_feature (15)..(16): BNA scaffold modification
aggaauuugugucutt

SEQ ID NO: 2044 - RNA, 16 nt, Artificial Sequence
  Antisense oligonucleotide
  misc_feature (1)..(2): BNA scaffold modification
  misc_feature (15)..(16): BNA scaffold modification
aggaauuugugucutt

SEQ ID NO: 2045 - RNA, 16 nt, Artificial Sequence
  Antisense oligonucleotide
  misc_feature (1)..(1): BNA scaffold modification
  misc_feature (16)..(16): BNA scaffold modification
ggaauuugugucuuuc

SEQ ID NO: 2046 - RNA, 16 nt, Artificial Sequence
  Antisense oligonucleotide
  misc_feature (1)..(1): BNA scaffold modification
  misc_feature (12)..(12): BNA scaffold modification
  misc_feature (16)..(16): BNA scaffold modification
ggaauuugugucuuuc

SEQ ID NO: 2047 - RNA, 16 nt, Artificial Sequence
  Antisense oligonucleotide
  misc_feature (1)..(1): BNA scaffold modification
  misc_feature (10)..(10): BNA scaffold modification
  misc_feature (16)..(16): BNA scaffold modification
ggaauuugugucuuuc

SEQ ID NO: 2048 - RNA, 16 nt, Artificial Sequence
  Antisense oligonucleotide
  misc_feature (1)..(1): BNA scaffold modification
  misc_feature (8)..(8): BNA scaffold modification
  misc_feature (16)..(16): BNA scaffold modification
ggaauuugugucuuuc

SEQ ID NO: 2049 - RNA, 16 nt, Artificial Sequence
  Antisense oligonucleotide
  misc_feature (1)..(2): BNA scaffold modification
  misc_feature (16)..(16): BNA scaffold modification
ggaauuugugucuuuc

SEQ ID NO: 2050 - RNA, 16 nt, Artificial Sequence
  Antisense oligonucleotide
  misc_feature (1)..(1): BNA scaffold modification
  misc_feature (8)..(8): BNA scaffold modification
  misc_feature (10)..(10): BNA scaffold modification
  misc_feature (16)..(16): BNA scaffold modification
ggaauuugugucuuuc

SEQ ID NO: 2051 - RNA, 16 nt, Artificial Sequence
  Antisense oligonucleotide
  misc_feature (1)..(1): BNA scaffold modification
  misc_feature (8)..(8): BNA scaffold modification
  misc_feature (10)..(10): BNA scaffold modification
  misc_feature (12)..(12): BNA scaffold modification
  misc_feature (16)..(16): BNA scaffold modification
ggaauuugugucuuuc

SEQ ID NO: 2052 - RNA, 16 nt, Artificial Sequence
  Antisense oligonucleotide
  misc_feature (1)..(2): BNA scaffold modification
  misc_feature (15)..(16): BNA scaffold modification
ggaauuugugucuutc

SEQ ID NO: 2053 - RNA, 16 nt, Artificial Sequence
  Antisense oligonucleotide
  misc_feature (1)..(1): BNA scaffold modification
  misc_feature (8)..(8): BNA scaffold modification
  misc_feature (10)..(10): BNA scaffold modification
  misc_feature (12)..(12): BNA scaffold modification
  misc_feature (16)..(16): BNA scaffold modification
ggaauuugugucuuuc

SEQ ID NO: 2054 - RNA, 16 nt, Artificial Sequence
  Antisense oligonucleotide
  misc_feature (1)..(2): BNA scaffold modification
  misc_feature (8)..(8): BNA scaffold modification
  misc_feature (10)..(10): BNA scaffold modification
  misc_feature (12)..(12): BNA scaffold modification
  misc_feature (16)..(16): BNA scaffold modification
ggaauuugugucuuuc

SEQ ID NO: 2055 - RNA, 23 nt, Artificial Sequence
  Antisense oligonucleotide
  misc_feature (1)..(1): BNA scaffold modification
  misc_feature (3)..(3): BNA scaffold modification
  misc_feature (23)..(23): BNA scaffold modification
gccauuucucaacagaucuguca

SEQ ID NO: 2056 - RNA, 23 nt, Artificial Sequence
  Antisense oligonucleotide
  misc_feature (1)..(1): BNA scaffold modification
  misc_feature (8)..(8): BNA scaffold modification
  misc_feature (23)..(23): BNA scaffold modification
gccauuucucaacagaucuguca

SEQ ID NO: 2057 - RNA, 23 nt, Artificial Sequence
  Antisense oligonucleotide
  misc_feature (1)..(1): BNA scaffold modification
  misc_feature (10)..(10): BNA scaffold modification
  misc_feature (23)..(23): BNA scaffold modification
gccauuucucaacagaucuguca

SEQ ID NO: 2058 - RNA, 23 nt, Artificial Sequence
  Antisense oligonucleotide
  misc_feature (1)..(1): BNA scaffold modification
  misc_feature (13)..(13): BNA scaffold modification
  misc_feature (23)..(23): BNA scaffold modification
gccauuucucaacagaucuguca

SEQ ID NO: 2059 - RNA, 23 nt, Artificial Sequence
  Antisense oligonucleotide
  misc_feature (1)..(1): BNA scaffold modification
  misc_feature (15)..(15): BNA scaffold modification
  misc_feature (23)..(23): BNA scaffold modification
gccauuucucaacagaucuguca

SEQ ID NO: 2060 - RNA, 23 nt, Artificial Sequence
  Antisense oligonucleotide
  misc_feature (1)..(1): BNA scaffold modification
  misc_feature (18)..(18): BNA scaffold modification
  misc_feature (23)..(23): BNA scaffold modification
gccauuucucaacagaucuguca

SEQ ID NO: 2061 - RNA, 23 nt, Artificial Sequence
  Antisense oligonucleotide
  misc_feature (1)..(1): BNA scaffold modification
  misc_feature (20)..(20): BNA scaffold modification
  misc_feature (23)..(23): BNA scaffold modification
gccauuucucaacagaucuguca

SEQ ID NO: 2062 - RNA, 23 nt, Artificial Sequence
  Antisense oligonucleotide
  misc_feature (1)..(1): BNA scaffold modification
  misc_feature (3)..(3): BNA scaffold modification
  misc_feature (8)..(8): BNA scaffold modification
  misc_feature (23)..(23): BNA scaffold modification
gccauuucucaacagaucuguca

SEQ ID NO: 2063 - RNA, 23 nt, Artificial Sequence
  Antisense oligonucleotide
  misc_feature (1)..(1): BNA scaffold modification
  misc_feature (10)..(10): BNA scaffold modification
  misc_feature (13)..(13): BNA scaffold modification
  misc_feature (23)..(23): BNA scaffold modification
gccauuucucaacagaucuguca

SEQ ID NO: 2064 - RNA, 23 nt, Artificial Sequence
  Antisense oligonucleotide
  misc_feature (1)..(1): BNA scaffold modification
  misc_feature (15)..(15): BNA scaffold modification
  misc_feature (20)..(20): BNA scaffold modification
  misc_feature (23)..(23): BNA scaffold modification
gccauuucucaacagaucuguca

SEQ ID NO: 2065 - RNA, 23 nt, Artificial Sequence
  Antisense oligonucleotide
  misc_feature (1)..(1): BNA scaffold modification
  misc_feature (8)..(8): BNA scaffold modification
  misc_feature (15)..(15): BNA scaffold modification
  misc_feature (20)..(20): BNA scaffold modification
  misc_feature (23)..(23): BNA scaffold modification
gccauuucucaacagaucuguca

SEQ ID NO: 2066 - RNA, 23 nt, Artificial Sequence
  Antisense oligonucleotide
  misc_feature (1)..(1): BNA scaffold modification
  misc_feature (8)..(8): BNA scaffold modification
  misc_feature (15)..(15): BNA scaffold modification
  misc_feature (20)..(20): BNA scaffold modification
  misc_feature (23)..(23): BNA scaffold modification
gccauuucucaacagaucuguca

SEQ ID NO: 2067 - RNA, 23 nt, Artificial Sequence
  Antisense oligonucleotide
  misc_feature (1)..(2): BNA scaffold modification
  misc_feature (22)..(23): BNA scaffold modification
gccauuucucaacagaucuguca

SEQ ID NO: 2068 - RNA, 23 nt, Artificial Sequence
  Antisense oligonucleotide
  misc_feature (1)..(2): BNA scaffold modification
  misc_feature (8)..(8): BNA scaffold modification
  misc_feature (18)..(18): BNA scaffold modification
  misc_feature (22)..(23): BNA scaffold modification
gccauuucucaacagaucuguca

SEQ ID NO: 2069 - RNA, 23 nt, Artificial Sequence
  Antisense oligonucleotide
  misc_feature (1)..(1): BNA scaffold modification
  misc_feature (8)..(8): BNA scaffold modification
  misc_feature (15)..(15): BNA scaffold modification
  misc_feature (20)..(20): BNA scaffold modification
  misc_feature (23)..(23): BNA scaffold modification
gccauuucucaacagaucuguca

SEQ ID NO: 2070 - RNA, 20 nt, Artificial Sequence
  Antisense oligonucleotide
  misc_feature (1)..(1): BNA scaffold modification
  misc_feature (20)..(20): BNA scaffold modification
gccauuucucaacagaucug

SEQ ID NO: 2071 - RNA, 20 nt, Artificial Sequence
  Antisense oligonucleotide
  misc_feature (1)..(1): BNA scaffold modification
  misc_feature (3)..(3): BNA scaffold modification
  misc_feature (20)..(20): BNA scaffold modification
gccauuucucaacagaucug

SEQ ID NO: 2072 - RNA, 20 nt, Artificial Sequence
  Antisense oligonucleotide
  misc_feature (1)..(1): BNA scaffold modification
  misc_feature (8)..(8): BNA scaffold modification
  misc_feature (20)..(20): BNA scaffold modification
gccauuucucaacagaucug

SEQ ID NO: 2073 - RNA, 20 nt, Artificial Sequence
  Antisense oligonucleotide
  misc_feature (1)..(1): BNA scaffold modification
  misc_feature (10)..(10): BNA scaffold modification
  misc_feature (20)..(20): BNA scaffold modification
gccauuucucaacagaucug

SEQ ID NO: 2074 - RNA, 20 nt, Artificial Sequence
  Antisense oligonucleotide
  misc_feature (1)..(1): BNA scaffold modification
  misc_feature (13)..(13): BNA scaffold modification
  misc_feature (20)..(20): BNA scaffold modification
gccauuucucaacagaucug

SEQ ID NO: 2075 - RNA, 20 nt, Artificial Sequence
  Antisense oligonucleotide
  misc_feature (1)..(1): BNA scaffold modification
  misc_feature (15)..(15): BNA scaffold modification
  misc_feature (20)..(20): BNA scaffold modification
gccauuucucaacagaucug

SEQ ID NO: 2076 - RNA, 20 nt, Artificial Sequence
  Antisense oligonucleotide
  misc_feature (1)..(1): BNA scaffold modification
  misc_feature (18)..(18): BNA scaffold modification
  misc_feature (20)..(20): BNA scaffold modification
gccauuucucaacagaucug

SEQ ID NO: 2077 - RNA, 20 nt, Artificial Sequence
  Antisense oligonucleotide
  misc_feature (1)..(1): BNA scaffold modification
  misc_feature (8)..(8): BNA scaffold modification
  misc_feature (15)..(15): BNA scaffold modification
  misc_feature (20)..(20): BNA scaffold modification
gccauuucucaacagaucug

SEQ ID NO: 2078 - RNA, 20 nt, Artificial Sequence
  Antisense oligonucleotide
  misc_feature (1)..(1): BNA scaffold modification
  misc_feature (3)..(3): BNA scaffold modification
  misc_feature (8)..(8): BNA scaffold modification
  misc_feature (13)..(13): BNA scaffold modification
  misc_feature (18)..(18): BNA scaffold modification
  misc_feature (20)..(20): BNA scaffold modification
gccauuucucaacagaucug

SEQ ID NO: 2079 - RNA, 20 nt, Artificial Sequence
  Antisense oligonucleotide
  misc_feature (1)..(1): BNA scaffold modification
  misc_feature (3)..(3): BNA scaffold modification
  misc_feature (18)..(18): BNA scaffold modification
  misc_feature (20)..(20): BNA scaffold modification
gccauuucucaacagaucug

SEQ ID NO: 2080 - RNA, 20 nt, Artificial Sequence
  Antisense oligonucleotide
  misc_feature (1)..(2): BNA scaffold modification
  misc_feature (10)..(10): BNA scaffold modification
  misc_feature (19)..(20): BNA scaffold modification
gccauuucucaacagauctg

SEQ ID NO: 2081 - RNA, 20 nt, Artificial Sequence
  Antisense oligonucleotide
  misc_feature (1)..(1): BNA scaffold modification
  misc_feature (20)..(20): BNA scaffold modification
ccauuucucaacagaucugt

SEQ ID NO: 2082 - RNA, 20 nt, Artificial Sequence
  Antisense oligonucleotide
  misc_feature (1)..(1): BNA scaffold modification
  misc_feature (7)..(7): BNA scaffold modification
  misc_feature (20)..(20): BNA scaffold modification
ccauuucucaacagaucugt

SEQ ID NO: 2083 - RNA, 20 nt, Artificial Sequence
  Antisense oligonucleotide
  misc_feature (1)..(1): BNA scaffold modification
  misc_feature (9)..(9): BNA scaffold modification
  misc_feature (20)..(20): BNA scaffold modification
ccauuucucaacagaucugt

SEQ ID NO: 2084 - RNA, 20 nt, Artificial Sequence
  Antisense oligonucleotide
  misc_feature (1)..(1): BNA scaffold modification
  misc_feature (12)..(12): BNA scaffold modification
  misc_feature (20)..(20): BNA scaffold modification
ccauuucucaacagaucugt

SEQ ID NO: 2085 - RNA, 20 nt, Artificial Sequence
  Antisense oligonucleotide
  misc_feature (1)..(1): BNA scaffold modification
  misc_feature (14)..(14): BNA scaffold modification
  misc_feature (20)..(20): BNA scaffold modification
ccauuucucaacagaucugt

SEQ ID NO: 2086 - RNA, 20 nt, Artificial Sequence
  Antisense oligonucleotide
  misc_feature (1)..(1): BNA scaffold modification
  misc_feature (17)..(17): BNA scaffold modification
  misc_feature (20)..(20): BNA scaffold modification
ccauuucucaacagaucugt

SEQ ID NO: 2087 - RNA, 20 nt, Artificial Sequence
  Antisense oligonucleotide
  misc_feature (1)..(1): BNA scaffold modification
  misc_feature (7)..(7): BNA scaffold modification
  misc_feature (14)..(14): BNA scaffold modification
  misc_feature (20)..(20): BNA scaffold modification
ccauuucucaacagaucugt

SEQ ID NO: 2088 - RNA, 20 nt, Artificial Sequence
  Antisense oligonucleotide
  misc_feature (1)..(2): BNA scaffold modification
  misc_feature (19)..(20): BNA scaffold modification
ccauuucucaacagaucugt

SEQ ID NO: 2089 - RNA, 20 nt, Artificial Sequence
  Antisense oligonucleotide
  misc_feature (1)..(1): BNA scaffold modification
  misc_feature (7)..(7): BNA scaffold modification
  misc_feature (12)..(12): BNA scaffold modification
  misc_feature (17)..(17): BNA scaffold modification
  misc_feature (20)..(20): BNA scaffold modification
ccauuucucaacagaucugt

SEQ ID NO: 2090 - RNA, 20 nt, Artificial Sequence
  Antisense oligonucleotide
  misc_feature (1)..(1): BNA scaffold modification
  misc_feature (7)..(7): BNA scaffold modification
  misc_feature (12)..(12): BNA scaffold modification
  misc_feature (20)..(20): BNA scaffold modification
ccauuucucaacagaucugt

SEQ ID NO: 2091 - RNA, 20 nt, Artificial Sequence
  Antisense oligonucleotide
  misc_feature (1)..(1): BNA scaffold modification
  misc_feature (7)..(7): BNA scaffold modification
  misc_feature (9)..(9): BNA scaffold modification
  misc_feature (12)..(12): BNA scaffold modification
  misc_feature (14)..(14): BNA scaffold modification
  misc_feature (20)..(20): BNA scaffold modification
ccauuucucaacagaucugt

SEQ ID NO: 2092 - RNA, 20 nt, Artificial Sequence
  Antisense oligonucleotide
  misc_feature (1)..(2): BNA scaffold modification
  misc_feature (12)..(12): BNA scaffold modification
  misc_feature (19)..(20): BNA scaffold modification
ccauuucucaacagaucugt

SEQ ID NO: 2093 - RNA, 20 nt, Artificial Sequence
  Antisense oligonucleotide
  misc_feature (1)..(1): BNA scaffold modification
  misc_feature (20)..(20): BNA scaffold modification
cauuucucaacagaucuguc

SEQ ID NO: 2094 - RNA, 20 nt, Artificial Sequence
  Antisense oligonucleotide
  misc_feature (1)..(1): BNA scaffold modification
  misc_feature (6)..(6): BNA scaffold modification
  misc_feature (20)..(20): BNA scaffold modification
cauuucucaacagaucuguc

SEQ ID NO: 2095 - RNA, 20 nt, Artificial Sequence
  Antisense oligonucleotide
  misc_feature (1)..(1): BNA scaffold modification
  misc_feature (8)..(8): BNA scaffold modification
  misc_feature (20)..(20): BNA scaffold modification
cauuucucaacagaucuguc

SEQ ID NO: 2096 - RNA, 20 nt, Artificial Sequence
  Antisense oligonucleotide
  misc_feature (1)..(1): BNA scaffold modification
  misc_feature (11)..(11): BNA scaffold modification
  misc_feature (20)..(20): BNA scaffold modification
cauuucucaacagaucuguc

SEQ ID NO: 2097 - RNA, 20 nt, Artificial Sequence
  Antisense oligonucleotide
  misc_feature (1)..(1): BNA scaffold modification
  misc_feature (13)..(13): BNA scaffold modification
  misc_feature (20)..(20): BNA scaffold modification
cauuucucaacagaucuguc

SEQ ID NO: 2098 - RNA, 20 nt, Artificial Sequence
  Antisense oligonucleotide
  misc_feature (1)..(1): BNA scaffold modification
  misc_feature (16)..(16): BNA scaffold modification
  misc_feature (20)..(20): BNA scaffold modification
cauuucucaacagaucuguc

SEQ ID NO: 2099 - RNA, 20 nt, Artificial Sequence
  Antisense oligonucleotide
  misc_feature (1)..(1): BNA scaffold modification
  misc_feature (18)..(18): BNA scaffold modification
  misc_feature (20)..(20): BNA scaffold modification
cauuucucaacagaucuguc

SEQ ID NO: 2100 - RNA, 14 nt, Artificial Sequence
  Antisense oligonucleotide
ccgacgagcagcga

SEQ ID NO: 2101 - RNA, 14 nt, Artificial Sequence
  Antisense oligonucleotide
ugcaacgauccgua

SEQ ID NO: 2102 - RNA, 14 nt, Artificial Sequence
  Antisense oligonucleotide
uuggcuccugaacu

SEQ ID NO: 2103 - RNA, 14 nt, Artificial Sequence
  Antisense oligonucleotide
ccuguccacccauc

SEQ ID NO: 2104 - RNA, 14 nt, Artificial Sequence
  Antisense oligonucleotide
ccgacgagcagcga

SEQ ID NO: 2105 - RNA, 14 nt, Artificial Sequence
  Antisense oligonucleotide
ugcaacgauccgua

SEQ ID NO: 2106 - RNA, 14 nt, Artificial Sequence
  Antisense oligonucleotide
uuggcuccugaacu

SEQ ID NO: 2107 - RNA, 14 nt, Artificial Sequence
  Antisense oligonucleotide
ccuguccacccauc

SEQ ID NO: 2108 - RNA, 14 nt, Artificial Sequence
  Antisense oligonucleotide
ugcaacgauccgua

SEQ ID NO: 2109 - RNA, 14 nt, Artificial Sequence
  Antisense oligonucleotide
uuggcuccugaacu

SEQ ID NO: 2110 - RNA, 14 nt, Artificial Sequence
  Antisense oligonucleotide
ccuguccacccauc

SEQ ID NO: 2111 - RNA, 14 nt, Artificial Sequence
  Antisense oligonucleotide
ccgacgagcagcga

SEQ ID NO: 2112 - RNA, 14 nt, Artificial Sequence
  Antisense oligonucleotide
ugcaacgauccgua

SEQ ID NO: 2113 - RNA, 14 nt, Artificial Sequence
  Antisense oligonucleotide
uuggcuccugaacu

SEQ ID NO: 2114 - RNA, 14 nt, Artificial Sequence
  Antisense oligonucleotide
ccuguccacccauc

SEQ ID NO: 2115 - RNA, 14 nt, Artificial Sequence
  Antisense oligonucleotide
ccgacgagcagcga

SEQ ID NO: 2116 - RNA, 14 nt, Artificial Sequence
  Antisense oligonucleotide
ugcaacgauccgua

SEQ ID NO: 2117 - RNA, 14 nt, Artificial Sequence
  Antisense oligonucleotide
uuggcuccugaacu

SEQ ID NO: 2118 - RNA, 14 nt, Artificial Sequence
  Antisense oligonucleotide
ccuguccacccauc

SEQ ID NO: 2119 - RNA, 14 nt, Artificial Sequence
  Antisense oligonucleotide
ccgacgagcagcga

SEQ ID NO: 2120 - RNA, 14 nt, Artificial Sequence
  Antisense oligonucleotide
ugcaacgauccgua

SEQ ID NO: 2121 - RNA, 14 nt, Artificial Sequence
  Antisense oligonucleotide
uuggcuccugaacu

SEQ ID NO: 2122 - RNA, 14 nt, Artificial Sequence
  Antisense oligonucleotide
ccuguccacccauc

SEQ ID NO: 2123 - RNA, 14 nt, Artificial Sequence
  Antisense oligonucleotide
ugcaacgauccgua

SEQ ID NO: 2124 - RNA, 14 nt, Artificial Sequence
  Antisense oligonucleotide
uuggcuccugaacu

SEQ ID NO: 2125 - RNA, 14 nt, Artificial Sequence
  Antisense oligonucleotide
ccuguccacccauc

SEQ ID NO: 2126 - RNA, 14 nt, Artificial Sequence
  Antisense oligonucleotide
ccgacgagcagcga

SEQ ID NO: 2127 - RNA, 14 nt, Artificial Sequence
  Antisense oligonucleotide
ugcaacgauccgua

SEQ ID NO: 2128 - RNA, 14 nt, Artificial Sequence
  Antisense oligonucleotide
ccgacgagcagcga

SEQ ID NO: 2129 - RNA, 14 nt, Artificial Sequence
  Antisense oligonucleotide
ugcaacgauccgua

SEQ ID NO: 2130 - RNA, 14 nt, Artificial Sequence
  Antisense oligonucleotide
uuggcuccugaacu

SEQ ID NO: 2131 - RNA, 14 nt, Artificial Sequence
  Antisense oligonucleotide
ccuguccacccauc

SEQ ID NO: 2132 - RNA, 14 nt, Artificial Sequence
  Antisense oligonucleotide
ccgacgagcagcga

SEQ ID NO: 2133 - RNA, 14 nt, Artificial Sequence
  Antisense oligonucleotide
ugcaacgauccgua

SEQ ID NO: 2134 - RNA, 14 nt, Artificial Sequence
  Antisense oligonucleotide
uuggcuccugaacu

SEQ ID NO: 2135 - RNA, 14 nt, Artificial Sequence
  Antisense oligonucleotide
ccuguccacccauc

SEQ ID NO: 2136 - RNA, 14 nt, Artificial Sequence
  Antisense oligonucleotide
ugcaacgauccgua

SEQ ID NO: 2137 - RNA, 14 nt, Artificial Sequence
  Antisense oligonucleotide
uuggcuccugaacu

SEQ ID NO: 2138 - RNA, 14 nt, Artificial Sequence
  Antisense oligonucleotide
ccuguccacccauc

SEQ ID NO: 2139 - RNA, 14 nt, Artificial Sequence
  Antisense oligonucleotide
ccgacgagcagcga

SEQ ID NO: 2140 - RNA, 14 nt, Artificial Sequence
  Antisense oligonucleotide
ugcaacgauccgua

SEQ ID NO: 2141 - RNA, 14 nt, Artificial Sequence
  Antisense oligonucleotide
uuggcuccugaacu

SEQ ID NO: 2142 - RNA, 14 nt, Artificial Sequence
  Antisense oligonucleotide
ccuguccacccauc

SEQ ID NO: 2143 - RNA, 14 nt, Artificial Sequence
  Antisense oligonucleotide
ccgacgagcagcga

SEQ ID NO: 2144 - RNA, 14 nt, Artificial Sequence
  Antisense oligonucleotide
ugcaacgauccgua

SEQ ID NO: 2145 - RNA, 14 nt, Artificial Sequence
  Antisense oligonucleotide
uuggcuccugaacu

SEQ ID NO: 2146 - RNA, 14 nt, Artificial Sequence
  Antisense oligonucleotide
ccuguccacccauc

SEQ ID NO: 2147 - RNA, 14 nt, Artificial Sequence
  Antisense oligonucleotide
ccgacgagcagcga

SEQ ID NO: 2148 - RNA, 14 nt, Artificial Sequence
  Antisense oligonucleotide
ugcaacgauccgua

SEQ ID NO: 2149 - RNA, 14 nt, Artificial Sequence
  Antisense oligonucleotide
uuggcuccugaacu

SEQ ID NO: 2150 - RNA, 14 nt, Artificial Sequence
  Antisense oligonucleotide
ccuguccacccauc

SEQ ID NO: 2151 - RNA, 14 nt, Artificial Sequence
  Antisense oligonucleotide
ugcaacgauccgua

SEQ ID NO: 2152 - RNA, 14 nt, Artificial Sequence
  Antisense oligonucleotide
uuggcuccugaacu

SEQ ID NO: 2153 - RNA, 14 nt, Artificial Sequence
  Antisense oligonucleotide
ccuguccacccauc

SEQ ID NO: 2154 - RNA, 14 nt, Artificial Sequence
  Antisense oligonucleotide
ccgacgagcagcga

SEQ ID NO: 2155 - RNA, 14 nt, Artificial Sequence
  Antisense oligonucleotide
ugcaacgauccgua

SEQ ID NO: 2156 - RNA, 14 nt, Artificial Sequence
  Antisense oligonucleotide
uuggcuccugaacu

SEQ ID NO: 2157 - RNA, 14 nt, Artificial Sequence
  Antisense oligonucleotide
ccuguccacccauc

SEQ ID NO: 2158 - RNA, 14 nt, Artificial Sequence
  Antisense oligonucleotide
ccccugugcucacu

SEQ ID NO: 2159 - RNA, 14 nt, Artificial Sequence
  Antisense oligonucleotide
ccgacgagcagcga

SEQ ID NO: 2160 - RNA, 14 nt, Artificial Sequence
  Antisense oligonucleotide
ugcaacgauccgua

SEQ ID NO: 2161 - RNA, 14 nt, Artificial Sequence
  Antisense oligonucleotide
uuggcuccugaacu

SEQ ID NO: 2162 - RNA, 14 nt, Artificial Sequence
  Antisense oligonucleotide
ccuguccacccauc

SEQ ID NO: 2163 - RNA, 14 nt, Artificial Sequence
  Antisense oligonucleotide
ccgacgagcagcga

SEQ ID NO: 2164 - RNA, 14 nt, Artificial Sequence
  Antisense oligonucleotide
ugcaacgauccgua

SEQ ID NO: 2165 - RNA, 14 nt, Artificial Sequence
  Antisense oligonucleotide
uuggcuccugaacu

SEQ ID NO: 2166 - RNA, 14 nt, Artificial Sequence
  Antisense oligonucleotide
ccuguccacccauc

SEQ ID NO: 2167 - RNA, 14 nt, Artificial Sequence
  Antisense oligonucleotide
ugcaacgauccgua

SEQ ID NO: 2168 - RNA, 14 nt, Artificial Sequence
  Antisense oligonucleotide
uuggcuccugaacu

SEQ ID NO: 2169 - RNA, 14 nt, Artificial Sequence
  Antisense oligonucleotide
ccuguccacccauc

SEQ ID NO: 2170 - RNA, 14 nt, Artificial Sequence
  Antisense oligonucleotide
ccgacgagcagcga

SEQ ID NO: 2171 - RNA, 14 nt, Artificial Sequence
  Antisense oligonucleotide
ugcaacgauccgua

SEQ ID NO: 2172 - RNA, 14 nt, Artificial Sequence
  Antisense oligonucleotide
uuggcuccugaacu

SEQ ID NO: 2173 - RNA, 14 nt, Artificial Sequence
  Antisense oligonucleotide
ccuguccacccauc

SEQ ID NO: 2174 - RNA, 14 nt, Artificial Sequence
  Antisense oligonucleotide
ccgacgagcagcga

SEQ ID NO: 2175 - RNA, 14 nt, Artificial Sequence
  Antisense oligonucleotide
ugcaacgauccgua

SEQ ID NO: 2176 - RNA, 14 nt, Artificial Sequence
  Antisense oligonucleotide
uuggcuccugaacu

SEQ ID NO: 2177 - RNA, 14 nt, Artificial Sequence
  Antisense oligonucleotide
ccuguccacccauc

SEQ ID NO: 2178 - RNA, 14 nt, Artificial Sequence
  Antisense oligonucleotide
ccgacgagcagcga

SEQ ID NO: 2179 - RNA, 14 nt, Artificial Sequence
  Antisense oligonucleotide
ugcaacgauccgua

SEQ ID NO: 2180 - RNA, 14 nt, Artificial Sequence
  Antisense oligonucleotide
uuggcuccugaacu

SEQ ID NO: 2181 - RNA, 14 nt, Artificial Sequence
  Antisense oligonucleotide
ccuguccacccauc

SEQ ID NO: 2182 - RNA, 14 nt, Artificial Sequence
  Antisense oligonucleotide
ugcaacgauccgua

SEQ ID NO: 2183 - RNA, 14 nt, Artificial Sequence
  Antisense oligonucleotide
uuggcuccugaacu

SEQ ID NO: 2184 - RNA, 14 nt, Artificial Sequence
  Antisense oligonucleotide
ccuguccacccauc

SEQ ID NO: 2185 - RNA, 14 nt, Artificial Sequence
  Antisense oligonucleotide
ccgacgagcagcga

SEQ ID NO: 2186 - RNA, 14 nt, Artificial Sequence
  Antisense oligonucleotide
ugcaacgauccgua

SEQ ID NO: 2187 - RNA, 14 nt, Artificial Sequence
  Antisense oligonucleotide
ccgacgagcagcga

SEQ ID NO: 2188 - RNA, 14 nt, Artificial Sequence
  Antisense oligonucleotide
ugcaacgauccgua

SEQ ID NO: 2189 - RNA, 14 nt, Artificial Sequence
  Antisense oligonucleotide
uuggcuccugaacu

SEQ ID NO: 2190 - RNA, 14 nt, Artificial Sequence
  Antisense oligonucleotide
ccuguccacccauc

SEQ ID NO: 2191 - RNA, 14 nt, Artificial Sequence
  Antisense oligonucleotide
ccgacgagcagcga

SEQ ID NO: 2192 - RNA, 14 nt, Artificial Sequence
  Antisense oligonucleotide
ugcaacgauccgua

SEQ ID NO: 2193 - RNA, 14 nt, Artificial Sequence
  Antisense oligonucleotide
uuggcuccugaacu

SEQ ID NO: 2194 - RNA, 14 nt, Artificial Sequence
  Antisense oligonucleotide
ccuguccacccauc

SEQ ID NO: 2195 - RNA, 14 nt, Artificial Sequence
  Antisense oligonucleotide
ugcaacgauccgua

SEQ ID NO: 2196 - RNA, 14 nt, Artificial Sequence
  Antisense oligonucleotide
uuggcuccugaacu

SEQ ID NO: 2197 - RNA, 14 nt, Artificial Sequence
  Antisense oligonucleotide
ccuguccacccauc

SEQ ID NO: 2198 - RNA, 14 nt, Artificial Sequence
  Antisense oligonucleotide
ccgacgagcagcga

SEQ ID NO: 2199 - RNA, 14 nt, Artificial Sequence
  Antisense oligonucleotide
ugcaacgauccgua

SEQ ID NO: 2200 - RNA, 14 nt, Artificial Sequence
  Antisense oligonucleotide
uuggcuccugaacu

SEQ ID NO: 2201 - RNA, 14 nt, Artificial Sequence
  Antisense oligonucleotide
ccuguccacccauc

SEQ ID NO: 2202 - RNA, 14 nt, Artificial Sequence
  Antisense oligonucleotide
ccgacgagcagcga

SEQ ID NO: 2203 - RNA, 14 nt, Artificial Sequence
  Antisense oligonucleotide
ugcaacgauccgua

SEQ ID NO: 2204 - RNA, 14 nt, Artificial Sequence
  Antisense oligonucleotide
uuggcuccugaacu

SEQ ID NO: 2205 - RNA, 14 nt, Artificial Sequence
  Antisense oligonucleotide
ccuguccacccauc

SEQ ID NO: 2206 - RNA, 14 nt, Artificial Sequence
  Antisense oligonucleotide
ccgacgagcagcga

SEQ ID NO: 2207 - RNA, 14 nt, Artificial Sequence
  Antisense oligonucleotide
ugcaacgauccgua

SEQ ID NO: 2208 - RNA, 14 nt, Artificial Sequence
  Antisense oligonucleotide
uuggcuccugaacu

SEQ ID NO: 2209 - RNA, 14 nt, Artificial Sequence
  Antisense oligonucleotide
ccuguccacccauc

SEQ ID NO: 2210 - RNA, 14 nt, Artificial Sequence
  Antisense oligonucleotide
ugcaacgauccgua

SEQ ID NO: 2211 - RNA, 14 nt, Artificial Sequence
  Antisense oligonucleotide
uuggcuccugaacu

SEQ ID NO: 2212 - RNA, 14 nt, Artificial Sequence
  Antisense oligonucleotide
ccuguccacccauc

SEQ ID NO: 2213 - RNA, 14 nt, Artificial Sequence
  Antisense oligonucleotide
ccgacgagcagcga

SEQ ID NO: 2214 - RNA, 14 nt, Artificial Sequence
  Antisense oligonucleotide
ugcaacgauccgua

SEQ ID NO: 2215 - RNA, 14 nt, Artificial Sequence
  Antisense oligonucleotide
ccgacgagcagcga

SEQ ID NO: 2216 - RNA, 14 nt, Artificial Sequence
  Antisense oligonucleotide
ugcaacgauccgua

SEQ ID NO: 2217 - RNA, 14 nt, Artificial Sequence
  Antisense oligonucleotide
uuggcuccugaacu

SEQ ID NO: 2218 - RNA, 14 nt, Artificial Sequence
  Antisense oligonucleotide
ccuguccacccauc

SEQ ID NO: 2219 - RNA, 14 nt, Artificial Sequence
  Antisense oligonucleotide
ccgacgagcagcga

SEQ ID NO: 2220 - RNA, 14 nt, Artificial Sequence
  Antisense oligonucleotide
ugcaacgauccgua

SEQ ID NO: 2221 - RNA, 14 nt, Artificial Sequence
  Antisense oligonucleotide
uuggcuccugaacu

SEQ ID NO: 2222 - RNA, 14 nt, Artificial Sequence
  Antisense oligonucleotide
ccuguccacccauc

SEQ ID NO: 2223 - RNA, 14 nt, Artificial Sequence
  Antisense oligonucleotide
ugcaacgauccgua

SEQ ID NO: 2224 - RNA, 14 nt, Artificial Sequence
  Antisense oligonucleotide
uuggcuccugaacu

SEQ ID NO: 2225 - RNA, 14 nt, Artificial Sequence
  Antisense oligonucleotide
ccuguccacccauc

SEQ ID NO: 2226 - RNA, 14 nt, Artificial Sequence
  Antisense oligonucleotide
ccgacgagcagcga

SEQ ID NO: 2227 - RNA, 14 nt, Artificial Sequence
  Antisense oligonucleotide
ugcaacgauccgua

SEQ ID NO: 2228 - RNA, 14 nt, Artificial Sequence
  Antisense oligonucleotide
uuggcuccugaacu

SEQ ID NO: 2229 - RNA, 14 nt, Artificial Sequence
  Antisense oligonucleotide
ccuguccacccauc

SEQ ID NO: 2230 - RNA, 14 nt, Artificial Sequence
  Antisense oligonucleotide
ccgacgagcagcga

SEQ ID NO: 2231 - RNA, 14 nt, Artificial Sequence
  Antisense oligonucleotide
ugcaacgauccgua

SEQ ID NO: 2232 - RNA, 14 nt, Artificial Sequence
  Antisense oligonucleotide
uuggcuccugaacu

SEQ ID NO: 2233 - RNA, 14 nt, Artificial Sequence
  Antisense oligonucleotide
ccuguccacccauc

SEQ ID NO: 2234 - RNA, 14 nt, Artificial Sequence
  Antisense oligonucleotide
ccgacgagcagcga

SEQ ID NO: 2235 - RNA, 14 nt, Artificial Sequence
  Antisense oligonucleotide
ugcaacgauccgua

SEQ ID NO: 2236 - RNA, 14 nt, Artificial Sequence
  Antisense oligonucleotide
uuggcuccugaacu

SEQ ID NO: 2237 - RNA, 14 nt, Artificial Sequence
  Antisense oligonucleotide
ccuguccacccauc

SEQ ID NO: 2238 - RNA, 14 nt, Artificial Sequence
  Antisense oligonucleotide
ugcaacgauccgua

SEQ ID NO: 2239 - RNA, 14 nt, Artificial Sequence
  Antisense oligonucleotide
uuggcuccugaacu

SEQ ID NO: 2240 - RNA, 14 nt, Artificial Sequence
  Antisense oligonucleotide
ccuguccacccauc

SEQ ID NO: 2241 - RNA, 14 nt, Artificial Sequence
  Antisense oligonucleotide
ccgacgagcagcga

SEQ ID NO: 2242 - RNA, 14 nt, Artificial Sequence
  Antisense oligonucleotide
ugcaacgauccgua

SEQ ID NO: 2243 - RNA, 14 nt, Artificial Sequence
  Antisense oligonucleotide
ccgacgagcagcga

SEQ ID NO: 2244 - RNA, 14 nt, Artificial Sequence
  Antisense oligonucleotide
ugcaacgauccgua

SEQ ID NO: 2245 - RNA, 14 nt, Artificial Sequence
  Antisense oligonucleotide
uuggcuccugaacu

SEQ ID NO: 2246 - RNA, 14 nt, Artificial Sequence
  Antisense oligonucleotide
ccuguccacccauc

SEQ ID NO: 2247 - RNA, 14 nt, Artificial Sequence
  Antisense oligonucleotide
ccgacgagcagcga

SEQ ID NO: 2248 - RNA, 14 nt, Artificial Sequence
  Antisense oligonucleotide
ugcaacgauccgua

SEQ ID NO: 2249 - RNA, 14 nt, Artificial Sequence
  Antisense oligonucleotide
uuggcuccugaacu

SEQ ID NO: 2250 - RNA, 14 nt, Artificial Sequence
  Antisense oligonucleotide
ccuguccacccauc

SEQ ID NO: 2251 - RNA, 14 nt, Artificial Sequence
  Antisense oligonucleotide
ugcaacgauccgua

SEQ ID NO: 2252 - RNA, 14 nt, Artificial Sequence
  Antisense oligonucleotide
uuggcuccugaacu

SEQ ID NO: 2253 - RNA, 14 nt, Artificial Sequence
  Antisense oligonucleotide
ccuguccacccauc

SEQ ID NO: 2254 - RNA, 14 nt, Artificial Sequence
  Antisense oligonucleotide
ccgacgagcagcga

SEQ ID NO: 2255 - RNA, 14 nt, Artificial Sequence
  Antisense oligonucleotide
ugcaacgauccgua

SEQ ID NO: 2256 - RNA, 14 nt, Artificial Sequence
  Antisense oligonucleotide
uuggcuccugaacu

SEQ ID NO: 2257 - RNA, 14 nt, Artificial Sequence
  Antisense oligonucleotide
ccuguccacccauc

SEQ ID NO: 2258 - RNA, 14 nt, Artificial Sequence
  Antisense oligonucleotide
ccgacgagcagcga

SEQ ID NO: 2259 - RNA, 14 nt, Artificial Sequence
  Antisense oligonucleotide
ugcaacgauccgua

SEQ ID NO: 2260 - RNA, 14 nt, Artificial Sequence
  Antisense oligonucleotide
uuggcuccugaacu

SEQ ID NO: 2261 - RNA, 14 nt, Artificial Sequence
  Antisense oligonucleotide
ccuguccacccauc

SEQ ID NO: 2262 - RNA, 14 nt, Artificial Sequence
  Antisense oligonucleotide
ccgacgagcagcga

SEQ ID NO: 2263 - RNA, 14 nt, Artificial Sequence
  Antisense oligonucleotide
ugcaacgauccgua

SEQ ID NO: 2264 - RNA, 14 nt, Artificial Sequence
  Antisense oligonucleotide
uuggcuccugaacu

SEQ ID NO: 2265 - RNA, 14 nt, Artificial Sequence
  Antisense oligonucleotide
ccuguccacccauc

SEQ ID NO: 2266 - RNA, 14 nt, Artificial Sequence
  Antisense oligonucleotide
ugcaacgauccgua

SEQ ID NO: 2267 - RNA, 14 nt, Artificial Sequence
  Antisense oligonucleotide
ccgacgagcagcga

SEQ ID NO: 2268 - RNA, 14 nt, Artificial Sequence
  Antisense oligonucleotide
ugcaacgauccgua

SEQ ID NO: 2269 - RNA, 14 nt, Artificial Sequence
  Antisense oligonucleotide
uuggcuccugaacu

SEQ ID NO: 2270 - RNA, 14 nt, Artificial Sequence
  Antisense oligonucleotide
ccuguccacccauc

SEQ ID NO: 2271 - RNA, 14 nt, Artificial Sequence
  Antisense oligonucleotide
ccgacgagcagcga

SEQ ID NO: 2272 - RNA, 14 nt, Artificial Sequence
  Antisense oligonucleotide
ugcaacgauccgua

SEQ ID NO: 2273 - RNA, 14 nt, Artificial Sequence
  Antisense oligonucleotide
uuggcuccugaacu

SEQ ID NO: 2274 - RNA, 14 nt, Artificial Sequence
  Antisense oligonucleotide
ccuguccacccauc

SEQ ID NO: 2275 - RNA, 14 nt, Artificial Sequence
  Antisense oligonucleotide
ugcaacgauccgua

SEQ ID NO: 2276 - RNA, 14 nt, Artificial Sequence
  Antisense oligonucleotide
uuggcuccugaacu

SEQ ID NO: 2277 - RNA, 14 nt, Artificial Sequence
  Antisense oligonucleotide
ccuguccacccauc

SEQ ID NO: 2278 - RNA, 14 nt, Artificial Sequence
  Antisense oligonucleotide
ccgacgagcagcga

SEQ ID NO: 2279 - RNA, 14 nt, Artificial Sequence
  Antisense oligonucleotide
ugcaacgauccgua

SEQ ID NO: 2280 - RNA, 14 nt, Artificial Sequence
  Antisense oligonucleotide
uuggcuccugaacu

SEQ ID NO: 2281 - RNA, 14 nt, Artificial Sequence
  Antisense oligonucleotide
ccuguccacccauc

SEQ ID NO: 2282 - RNA, 14 nt, Artificial Sequence
  Antisense oligonucleotide
ccgacgagcagcga

SEQ ID NO: 2283 - RNA, 14 nt, Artificial Sequence
  Antisense oligonucleotide
ugcaacgauccgua

SEQ ID NO: 2284 - RNA, 14 nt, Artificial Sequence
  Antisense oligonucleotide
uuggcuccugaacu

SEQ ID NO: 2285 - RNA, 14 nt, Artificial Sequence
  Antisense oligonucleotide
ccuguccacccauc

SEQ ID NO: 2286 - RNA, 14 nt, Artificial Sequence
  Antisense oligonucleotide
ccgacgagcagcga

SEQ ID NO: 2287 - RNA, 14 nt, Artificial Sequence
  Antisense oligonucleotide
ugcaacgauccgua

SEQ ID NO: 2288 - RNA, 14 nt, Artificial Sequence
  Antisense oligonucleotide
uuggcuccugaacu

SEQ ID NO: 2289 - RNA, 14 nt, Artificial Sequence
  Antisense oligonucleotide
ccuguccacccauc

SEQ ID NO: 2290 - RNA, 14 nt, Artificial Sequence
  Antisense oligonucleotide
ugcaacgauccgua

SEQ ID NO: 2291 - RNA, 14 nt, Artificial Sequence
  Antisense oligonucleotide
uuggcuccugaacu

SEQ ID NO: 2292 - RNA, 14 nt, Artificial Sequence
  Antisense oligonucleotide
ccuguccacccauc

SEQ ID NO: 2293 - RNA, 14 nt, Artificial Sequence
  Antisense oligonucleotide
ccgacgagcagcga

SEQ ID NO: 2294 - RNA, 14 nt, Artificial Sequence
  Antisense oligonucleotide
ugcaacgauccgua

SEQ ID NO: 2295 - RNA, 14 nt, Artificial Sequence
  Antisense oligonucleotide
ccgacgagcagcga

SEQ ID NO: 2296 - RNA, 14 nt, Artificial Sequence
  Antisense oligonucleotide
ugcaacgauccgua

SEQ ID NO: 2297 - RNA, 14 nt, Artificial Sequence
  Antisense oligonucleotide
uuggcuccugaacu

SEQ ID NO: 2298 - RNA, 14 nt, Artificial Sequence
  Antisense oligonucleotide
ccuguccacccauc

SEQ ID NO: 2299 - RNA, 14 nt, Artificial Sequence
  Antisense oligonucleotide
ccgacgagcagcga

SEQ ID NO: 2300 - RNA, 14 nt, Artificial Sequence
  Antisense oligonucleotide
ugcaacgauccgua

SEQ ID NO: 2301 - RNA, 14 nt, Artificial Sequence
  Antisense oligonucleotide
uuggcuccugaacu

SEQ ID NO: 2302 - RNA, 14 nt, Artificial Sequence
  Antisense oligonucleotide
ccuguccacccauc

SEQ ID NO: 2303 - RNA, 14 nt, Artificial Sequence
  Antisense oligonucleotide
ugcaacgauccgua

SEQ ID NO: 2304 - RNA, 14 nt, Artificial Sequence
  Antisense oligonucleotide
uuggcuccugaacu

SEQ ID NO: 2305 - RNA, 14 nt, Artificial Sequence
  Antisense oligonucleotide
ccuguccacccauc

SEQ ID NO: 2306 - RNA, 14 nt, Artificial Sequence
  Antisense oligonucleotide
ccgacgagcagcga

SEQ ID NO: 2307 - RNA, 14 nt, Artificial Sequence
  Antisense oligonucleotide
ugcaacgauccgua

SEQ ID NO: 2308 - RNA, 14 nt, Artificial Sequence
  Antisense oligonucleotide
uuggcuccugaacu

SEQ ID NO: 2309 - RNA, 14 nt, Artificial Sequence
  Antisense oligonucleotide
ccuguccacccauc

SEQ ID NO: 2310 - RNA, 14 nt, Artificial Sequence
  Antisense oligonucleotide
ccgacgagcagcga

SEQ ID NO: 2311 - RNA, 14 nt, Artificial Sequence
  Antisense oligonucleotide
ugcaacgauccgua

SEQ ID NO: 2312 - RNA, 14 nt, Artificial Sequence
  Antisense oligonucleotide
uuggcuccugaacu

SEQ ID NO: 2313 - RNA, 14 nt, Artificial Sequence
  Antisense oligonucleotide
ccuguccacccauc

SEQ ID NO: 2314 - RNA, 14 nt, Artificial Sequence
  Antisense oligonucleotide
ccgacgagcagcga

SEQ ID NO: 2315 - RNA, 14 nt, Artificial Sequence
  Antisense oligonucleotide
ugcaacgauccgua

SEQ ID NO: 2316 - RNA, 14 nt, Artificial Sequence
  Antisense oligonucleotide
uuggcuccugaacu

SEQ ID NO: 2317 - RNA, 14 nt, Artificial Sequence
  Antisense oligonucleotide
ccuguccacccauc

SEQ ID NO: 2318 - RNA, 14 nt, Artificial Sequence
  Antisense oligonucleotide
ugcaacgauccgua

SEQ ID NO: 2319 - RNA, 14 nt, Artificial Sequence
  Antisense oligonucleotide
uuggcuccugaacu

SEQ ID NO: 2320 - RNA, 14 nt, Artificial Sequence
  Antisense oligonucleotide
ccuguccacccauc

SEQ ID NO: 2321 - RNA, 14 nt, Artificial Sequence
  Antisense oligonucleotide
ccgacgagcagcga

SEQ ID NO: 2322 - RNA, 14 nt, Artificial Sequence
  Antisense oligonucleotide
ugcaacgauccgua

SEQ ID NO: 2323 - RNA, 14 nt, Artificial Sequence
  Antisense oligonucleotide
uuggcuccugaacu

SEQ ID NO: 2324 - RNA, 14 nt, Artificial Sequence
  Antisense oligonucleotide
ccuguccacccauc

SEQ ID NO: 2325 - RNA, 14 nt, Artificial Sequence
  Antisense oligonucleotide
ccccugugcucacu

SEQ ID NO: 2326 - RNA, 14 nt, Artificial Sequence
  Antisense oligonucleotide
ccgacgagcagcga

SEQ ID NO: 2327 - RNA, 14 nt, Artificial Sequence
  Antisense oligonucleotide
ugcaacgauccgua

SEQ ID NO: 2328 - RNA, 14 nt, Artificial Sequence
  Antisense oligonucleotide
uuggcuccugaacu

SEQ ID NO: 2329 - RNA, 14 nt, Artificial Sequence
  Antisense oligonucleotide
ccuguccacccauc

SEQ ID NO: 2330 - RNA, 14 nt, Artificial Sequence
  Antisense oligonucleotide
ccgacgagcagcga

SEQ ID NO: 2331 - RNA, 14 nt, Artificial Sequence
  Antisense oligonucleotide
ugcaacgauccgua

SEQ ID NO: 2332 - RNA, 14 nt, Artificial Sequence
  Antisense oligonucleotide
uuggcuccugaacu

SEQ ID NO: 2333 - RNA, 14 nt, Artificial Sequence
  Antisense oligonucleotide
ccuguccacccauc

SEQ ID NO: 2334 - RNA, 14 nt, Artificial Sequence
  Antisense oligonucleotide
ugcaacgauccgua

SEQ ID NO: 2335 - RNA, 14 nt, Artificial Sequence
  Antisense oligonucleotide
uuggcuccugaacu

SEQ ID NO: 2336 - RNA, 14 nt, Artificial Sequence
  Antisense oligonucleotide
ccuguccacccauc

SEQ ID NO: 2337 - RNA, 14 nt, Artificial Sequence
  Antisense oligonucleotide
ccgacgagcagcga

SEQ ID NO: 2338 - RNA, 14 nt, Artificial Sequence
  Antisense oligonucleotide
ugcaacgauccgua

SEQ ID NO: 2339 - RNA, 14 nt, Artificial Sequence
  Antisense oligonucleotide
uuggcuccugaacu

SEQ ID NO: 2340 - RNA, 14 nt, Artificial Sequence
  Antisense oligonucleotide
ccuguccacccauc

SEQ ID NO: 2341 - RNA, 14 nt, Artificial Sequence
  Antisense oligonucleotide
ccgacgagcagcga

SEQ ID NO: 2342 - RNA, 14 nt, Artificial Sequence
  Antisense oligonucleotide
ugcaacgauccgua

SEQ ID NO: 2343 - RNA, 14 nt, Artificial Sequence
  Antisense oligonucleotide
uuggcuccugaacu

SEQ ID NO: 2344 - RNA, 14 nt, Artificial Sequence
  Antisense oligonucleotide
ccuguccacccauc

SEQ ID NO: 2345 - RNA, 14 nt, Artificial Sequence
  Antisense oligonucleotide
ccgacgagcagcga

SEQ ID NO: 2346 - RNA, 14 nt, Artificial Sequence
  Antisense oligonucleotide
ugcaacgauccgua

SEQ ID NO: 2347 - RNA, 14 nt, Artificial Sequence
  Antisense oligonucleotide
uuggcuccugaacu

SEQ ID NO: 2348 - RNA, 14 nt, Artificial Sequence
  Antisense oligonucleotide
ccuguccacccauc

SEQ ID NO: 2349 - RNA, 14 nt, Artificial Sequence
  Antisense oligonucleotide
ugcaacgauccgua

SEQ ID NO: 2350 - RNA, 14 nt, Artificial Sequence
  Antisense oligonucleotide
uuggcuccugaacu

SEQ ID NO: 2351 - RNA, 14 nt, Artificial Sequence
  Antisense oligonucleotide
ccuguccacccauc

SEQ ID NO: 2352 - RNA, 14 nt, Artificial Sequence
  Antisense oligonucleotide
ccgacgagcagcga

SEQ ID NO: 2353 - RNA, 14 nt, Artificial Sequence
  Antisense oligonucleotide
ugcaacgauccgua

SEQ ID NO: 2354 - RNA, 14 nt, Artificial Sequence
  Antisense oligonucleotide
ccgacgagcagcga

SEQ ID NO: 2355 - RNA, 14 nt, Artificial Sequence
  Antisense oligonucleotide
ugcaacgauccgua

SEQ ID NO: 2356 - RNA, 14 nt, Artificial Sequence
  Antisense oligonucleotide
uuggcuccugaacu

SEQ ID NO: 2357 - RNA, 14 nt, Artificial Sequence
  Antisense oligonucleotide
ccuguccacccauc

SEQ ID NO: 2358 - RNA, 14 nt, Artificial Sequence
  Antisense oligonucleotide
ccgacgagcagcga

SEQ ID NO: 2359 - RNA, 14 nt, Artificial Sequence
  Antisense oligonucleotide
ugcaacgauccgua

SEQ ID NO: 2360 - RNA, 14 nt, Artificial Sequence
  Antisense oligonucleotide
uuggcuccugaacu

SEQ ID NO: 2361 - RNA, 14 nt, Artificial Sequence
  Antisense oligonucleotide
ccuguccacccauc

SEQ ID NO: 2362 - RNA, 14 nt, Artificial Sequence
  Antisense oligonucleotide
ugcaacgauccgua

SEQ ID NO: 2363 - RNA, 14 nt, Artificial Sequence
  Antisense oligonucleotide
uuggcuccugaacu

SEQ ID NO: 2364 - RNA, 14 nt, Artificial Sequence
  Antisense oligonucleotide
ccuguccacccauc

SEQ ID NO: 2365 - RNA, 14 nt, Artificial Sequence
  Antisense oligonucleotide
ccgacgagcagcga

SEQ ID NO: 2366 - RNA, 14 nt, Artificial Sequence
  Antisense oligonucleotide
ugcaacgauccgua

SEQ ID NO: 2367 - RNA, 14 nt, Artificial Sequence
  Antisense oligonucleotide
uuggcuccugaacu

SEQ ID NO: 2368 - RNA, 14 nt, Artificial Sequence
  Antisense oligonucleotide
ccuguccacccauc

SEQ ID NO: 2369 - RNA, 14 nt, Artificial Sequence
  Antisense oligonucleotide
ccgacgagcagcga

SEQ ID NO: 2370 - RNA, 14 nt, Artificial Sequence
  Antisense oligonucleotide
ugcaacgauccgua

SEQ ID NO: 2371 - RNA, 14 nt, Artificial Sequence
  Antisense oligonucleotide
uuggcuccugaacu

SEQ ID NO: 2372 - RNA, 14 nt, Artificial Sequence
  Antisense oligonucleotide
ccuguccacccauc

SEQ ID NO: 2373 - RNA, 14 nt, Artificial Sequence
  Antisense oligonucleotide
ccgacgagcagcga

SEQ ID NO: 2374 - RNA, 14 nt, Artificial Sequence
  Antisense oligonucleotide
ugcaacgauccgua

SEQ ID NO: 2375 - RNA, 14 nt, Artificial Sequence
  Antisense oligonucleotide
uuggcuccugaacu

SEQ ID NO: 2376 - RNA, 14 nt, Artificial Sequence
  Antisense oligonucleotide
ccuguccacccauc

SEQ ID NO: 2377 - RNA, 14 nt, Artificial Sequence
  Antisense oligonucleotide
ugcaacgauccgua

SEQ ID NO: 2378 - RNA, 14 nt, Artificial Sequence
  Antisense oligonucleotide
uuggcuccugaacu

SEQ ID NO: 2379 - RNA, 14 nt, Artificial Sequence
  Antisense oligonucleotide
ccuguccacccauc

SEQ ID NO: 2380 - RNA, 14 nt, Artificial Sequence
  Antisense oligonucleotide
ccgacgagcagcga

SEQ ID NO: 2381 - RNA, 14 nt, Artificial Sequence
  Antisense oligonucleotide
ugcaacgauccgua

SEQ ID NO: 2382 - RNA, 14 nt, Artificial Sequence
  Antisense oligonucleotide
uuggcuccugaacu

SEQ ID NO: 2383 - RNA, 14 nt, Artificial Sequence
  Antisense oligonucleotide
ccuguccacccauc

SEQ ID NO: 2384 - RNA, 14 nt, Artificial Sequence
  Antisense oligonucleotide
ccccugugcucacu

SEQ ID NO: 2385 - RNA, 14 nt, Artificial Sequence
  Antisense oligonucleotide
ccgacgagcagcga

SEQ ID NO: 2386 - RNA, 14 nt, Artificial Sequence
  Antisense oligonucleotide
ugcaacgauccgua

SEQ ID NO: 2387 - RNA, 14 nt, Artificial Sequence
  Antisense oligonucleotide
uuggcuccugaacu

SEQ ID NO: 2388 - RNA, 14 nt, Artificial Sequence
  Antisense oligonucleotide
ccuguccacccauc

SEQ ID NO: 2389 - RNA, 14 nt, Artificial Sequence
  Antisense oligonucleotide
ccgacgagcagcga

SEQ ID NO: 2390 - RNA, 14 nt, Artificial Sequence
  Antisense oligonucleotide
ugcaacgauccgua

SEQ ID NO: 2391 - RNA, 14 nt, Artificial Sequence
  Antisense oligonucleotide
uuggcuccugaacu

SEQ ID NO: 2392 - RNA, 14 nt, Artificial Sequence
  Antisense oligonucleotide
ccuguccacccauc

SEQ ID NO: 2393 - RNA, 14 nt, Artificial Sequence
  Antisense oligonucleotide
ccgacgagcagcga

SEQ ID NO: 2394 - RNA, 14 nt, Artificial Sequence
  Antisense oligonucleotide
ugcaacgauccgua

SEQ ID NO: 2395 - RNA, 14 nt, Artificial Sequence
  Antisense oligonucleotide
uuggcuccugaacu

SEQ ID NO: 2396 - RNA, 14 nt, Artificial Sequence
  Antisense oligonucleotide
ccuguccacccauc

SEQ ID NO: 2397 - RNA, 14 nt, Artificial Sequence
  Antisense oligonucleotide
ugcaacgauccgua

SEQ ID NO: 2398 - RNA, 14 nt, Artificial Sequence
  Antisense oligonucleotide
uuggcuccugaacu

SEQ ID NO: 2399 - RNA, 14 nt, Artificial Sequence
  Antisense oligonucleotide
ccuguccacccauc

SEQ ID NO: 2400 - RNA, 14 nt, Artificial Sequence
  Antisense oligonucleotide
ccgacgagcagcga

SEQ ID NO: 2401 - RNA, 14 nt, Artificial Sequence
  Antisense oligonucleotide
ugcaacgauccgua

SEQ ID NO: 2402 - RNA, 14 nt, Artificial Sequence
  Antisense oligonucleotide
ccgacgagcagcga

SEQ ID NO: 2403 - RNA, 14 nt, Artificial Sequence
  Antisense oligonucleotide
ugcaacgauccgua

SEQ ID NO: 2404 - RNA, 14 nt, Artificial Sequence
  Antisense oligonucleotide
uuggcuccugaacu

SEQ ID NO: 2405 - RNA, 14 nt, Artificial Sequence
  Antisense oligonucleotide
ccuguccacccauc

SEQ ID NO: 2406 - RNA, 14 nt, Artificial Sequence
  Antisense oligonucleotide
ccgacgagcagcga

SEQ ID NO: 2407 - RNA, 14 nt, Artificial Sequence
  Antisense oligonucleotide
ugcaacgauccgua

SEQ ID NO: 2408 - RNA, 14 nt, Artificial Sequence
  Antisense oligonucleotide
uuggcuccugaacu

SEQ ID NO: 2409 - RNA, 14 nt, Artificial Sequence
  Antisense oligonucleotide
ccuguccacccauc

SEQ ID NO: 2410 - RNA, 14 nt, Artificial Sequence
  Antisense oligonucleotide
ugcaacgauccgua

SEQ ID NO: 2411 - RNA, 14 nt, Artificial Sequence
  Antisense oligonucleotide
uuggcuccugaacu

SEQ ID NO: 2412 - RNA, 14 nt, Artificial Sequence
  Antisense oligonucleotide
ccuguccacccauc

SEQ ID NO: 2413 - RNA, 14 nt, Artificial Sequence
  Antisense oligonucleotide
ccgacgagcagcga

SEQ ID NO: 2414 - RNA, 14 nt, Artificial Sequence
  Antisense oligonucleotide
ugcaacgauccgua

SEQ ID NO: 2415 - RNA, 14 nt, Artificial Sequence
  Antisense oligonucleotide
uuggcuccugaacu

SEQ ID NO: 2416 - RNA, 14 nt, Artificial Sequence
  Antisense oligonucleotide
ccuguccacccauc

SEQ ID NO: 2417 - RNA, 14 nt, Artificial Sequence
  Antisense oligonucleotide
ccgacgagcagcga

SEQ ID NO: 2418 - RNA, 14 nt, Artificial Sequence
  Antisense oligonucleotide
ugcaacgauccgua

SEQ ID NO: 2419 - RNA, 14 nt, Artificial Sequence
  Antisense oligonucleotide
uuggcuccugaacu

SEQ ID NO: 2420 - RNA, 14 nt, Artificial Sequence
  Antisense oligonucleotide
ccuguccacccauc

SEQ ID NO: 2421 - RNA, 14 nt, Artificial Sequence
  Antisense oligonucleotide
ccgacgagcagcga

SEQ ID NO: 2422 - RNA, 14 nt, Artificial Sequence
  Antisense oligonucleotide
ugcaacgauccgua

SEQ ID NO: 2423 - RNA, 14 nt, Artificial Sequence
  Antisense oligonucleotide
uuggcuccugaacu

SEQ ID NO: 2424 - RNA, 14 nt, Artificial Sequence
  Antisense oligonucleotide
ccuguccacccauc

SEQ ID NO: 2425 - RNA, 14 nt, Artificial Sequence
  Antisense oligonucleotide
ugcaacgauccgua

SEQ ID NO: 2426 - RNA, 14 nt, Artificial Sequence
  Antisense oligonucleotide
uuggcuccugaacu

SEQ ID NO: 2427 - RNA, 14 nt, Artificial Sequence
  Antisense oligonucleotide
ccuguccacccauc

SEQ ID NO: 2428 - RNA, 14 nt, Artificial Sequence
  Antisense oligonucleotide
ccgacgagcagcga

SEQ ID NO: 2429 - RNA, 14 nt, Artificial Sequence
  Antisense oligonucleotide
ugcaacgauccgua

SEQ ID NO: 2430 - RNA, 14 nt, Artificial Sequence
  Antisense oligonucleotide
uuggcuccugaacu

SEQ ID NO: 2431 - RNA, 14 nt, Artificial Sequence
  Antisense oligonucleotide
ccuguccacccauc

SEQ ID NO: 2432 - RNA, 14 nt, Artificial Sequence
  Antisense oligonucleotide
ccccugugcucacu

SEQ ID NO: 2433 - RNA, 14 nt, Artificial Sequence
  Antisense oligonucleotide
ccgacgagcagcga

SEQ ID NO: 2434 - RNA, 14 nt, Artificial Sequence
  Antisense oligonucleotide
ugcaacgauccgua

SEQ ID NO: 2435 - RNA, 14 nt, Artificial Sequence
  Antisense oligonucleotide
uuggcuccugaacu

SEQ ID NO: 2436 - RNA, 14 nt, Artificial Sequence
  Antisense oligonucleotide
ccuguccacccauc

SEQ ID NO: 2437 - RNA, 14 nt, Artificial Sequence
  Antisense oligonucleotide
ccgacgagcagcga

SEQ ID NO: 2438 - RNA, 14 nt, Artificial Sequence
  Antisense oligonucleotide
ugcaacgauccgua

SEQ ID NO: 2439 - RNA, 14 nt, Artificial Sequence
  Antisense oligonucleotide
uuggcuccugaacu

SEQ ID NO: 2440 - RNA, 14 nt, Artificial Sequence
  Antisense oligonucleotide
ccuguccacccauc

SEQ ID NO: 2441 - RNA, 14 nt, Artificial Sequence
  Antisense oligonucleotide
ugcaacgauccgua

SEQ ID NO: 2442 - RNA, 14 nt, Artificial Sequence
  Antisense oligonucleotide
uuggcuccugaacu

SEQ ID NO: 2443 - RNA, 14 nt, Artificial Sequence
  Antisense oligonucleotide
ccuguccacccauc

SEQ ID NO: 2444 - RNA, 14 nt, Artificial Sequence
  Antisense oligonucleotide
ccgacgagcagcga

SEQ ID NO: 2445 - RNA, 14 nt, Artificial Sequence
  Antisense oligonucleotide
ugcaacgauccgua

SEQ ID NO: 2446 - RNA, 14 nt, Artificial Sequence
  Antisense oligonucleotide
uuggcuccugaacu

SEQ ID NO: 2447 - RNA, 14 nt, Artificial Sequence
  Antisense oligonucleotide
ccuguccacccauc

SEQ ID NO: 2448 - RNA, 14 nt, Artificial Sequence
  Antisense oligonucleotide
ccgacgagcagcga

SEQ ID NO: 2449 - RNA, 14 nt, Artificial Sequence
  Antisense oligonucleotide
ugcaacgauccgua

SEQ ID NO: 2450 - RNA, 14 nt, Artificial Sequence
  Antisense oligonucleotide
uuggcuccugaacu

SEQ ID NO: 2451 - RNA, 14 nt, Artificial Sequence
  Antisense oligonucleotide
ccuguccacccauc

SEQ ID NO: 2452 - RNA, 14 nt, Artificial Sequence
  Antisense oligonucleotide
ccgacgagcagcga

SEQ ID NO: 2453 - RNA, 14 nt, Artificial Sequence
  Antisense oligonucleotide
ugcaacgauccgua

SEQ ID NO: 2454 - RNA, 14 nt, Artificial Sequence
  Antisense oligonucleotide
uuggcuccugaacu

SEQ ID NO: 2455 - RNA, 14 nt, Artificial Sequence
  Antisense oligonucleotide
ccuguccacccauc

SEQ ID NO: 2456 - RNA, 14 nt, Artificial Sequence
  Antisense oligonucleotide
ugcaacgauccgua

SEQ ID NO: 2457 - RNA, 14 nt, Artificial Sequence
  Antisense oligonucleotide
uuggcuccugaacu

SEQ ID NO: 2458 - RNA, 14 nt, Artificial Sequence
  Antisense oligonucleotide
ccuguccacccauc

SEQ ID NO: 2459 - RNA, 14 nt, Artificial Sequence
  Antisense oligonucleotide
ccgacgagcagcga

SEQ ID NO: 2460 - RNA, 14 nt, Artificial Sequence
  Antisense oligonucleotide
ugcaacgauccgua

SEQ ID NO: 2461 - RNA, 14 nt, Artificial Sequence
  Antisense oligonucleotide
ccgacgagcagcga

SEQ ID NO: 2462 - RNA, 14 nt, Artificial Sequence
  Antisense oligonucleotide
ugcaacgauccgua

SEQ ID NO: 2463 - RNA, 14 nt, Artificial Sequence
  Antisense oligonucleotide
uuggcuccugaacu

SEQ ID NO: 2464 - RNA, 14 nt, Artificial Sequence
  Antisense oligonucleotide
ccuguccacccauc

SEQ ID NO: 2465 - RNA, 14 nt, Artificial Sequence
  Antisense oligonucleotide
ccgacgagcagcga

SEQ ID NO: 2466 - RNA, 14 nt, Artificial Sequence
  Antisense oligonucleotide
ugcaacgauccgua

SEQ ID NO: 2467 - RNA, 14 nt, Artificial Sequence
  Antisense oligonucleotide
uuggcuccugaacu

SEQ ID NO: 2468 - RNA, 14 nt, Artificial Sequence
  Antisense oligonucleotide
ccuguccacccauc

SEQ ID NO: 2469 - RNA, 14 nt, Artificial Sequence
  Antisense oligonucleotide
ugcaacgauccgua

SEQ ID NO: 2470 - RNA, 14 nt, Artificial Sequence
  Antisense oligonucleotide
uuggcuccugaacu

SEQ ID NO: 2471 - RNA, 14 nt, Artificial Sequence
  Antisense oligonucleotide
ccuguccacccauc

SEQ ID NO: 2472 - RNA, 14 nt, Artificial Sequence
  Antisense oligonucleotide
ccgacgagcagcga

SEQ ID NO: 2473 - RNA, 14 nt, Artificial Sequence
  Antisense oligonucleotide
ugcaacgauccgua

SEQ ID NO: 2474 - RNA, 14 nt, Artificial Sequence
  Antisense oligonucleotide
uuggcuccugaacu

SEQ ID NO: 2475 - RNA, 14 nt, Artificial Sequence
  Antisense oligonucleotide
ccuguccacccauc

SEQ ID NO: 2476 - RNA, 14 nt, Artificial Sequence
  Antisense oligonucleotide
ccgacgagcagcga

SEQ ID NO: 2477 - RNA, 14 nt, Artificial Sequence
  Antisense oligonucleotide
ugcaacgauccgua

SEQ ID NO: 2478 - RNA, 14 nt, Artificial Sequence
  Antisense oligonucleotide
uuggcuccugaacu

SEQ ID NO: 2479 - RNA, 14 nt, Artificial Sequence
  Antisense oligonucleotide
ccuguccacccauc

SEQ ID NO: 2480 - RNA, 14 nt, Artificial Sequence
  Antisense oligonucleotide
ccgacgagcagcga

SEQ ID NO: 2481 - RNA, 14 nt, Artificial Sequence
  Antisense oligonucleotide
ugcaacgauccgua

SEQ ID NO: 2482 - RNA, 14 nt, Artificial Sequence
  Antisense oligonucleotide
uuggcuccugaacu

SEQ ID NO: 2483 - RNA, 14 nt, Artificial Sequence
  Antisense oligonucleotide
ccuguccacccauc

SEQ ID NO: 2484 - RNA, 14 nt, Artificial Sequence
  Antisense oligonucleotide
ugcaacgauccgua

SEQ ID NO: 2485 - RNA, 14 nt, Artificial Sequence
  Antisense oligonucleotide
uuggcuccugaacu

SEQ ID NO: 2486 - RNA, 14 nt, Artificial Sequence
  Antisense oligonucleotide
ccuguccacccauc

SEQ ID NO: 2487 - RNA, 14 nt, Artificial Sequence
  Antisense oligonucleotide
ccgacgagcagcga

SEQ ID NO: 2488 - RNA, 14 nt, Artificial Sequence
  Antisense oligonucleotide
ugcaacgauccgua

SEQ ID NO: 2489 - RNA, 14 nt, Artificial Sequence
  Antisense oligonucleotide
ccgacgagcagcga

SEQ ID NO: 2490 - RNA, 14 nt, Artificial Sequence
  Antisense oligonucleotide
ugcaacgauccgua

SEQ ID NO: 2491 - RNA, 14 nt, Artificial Sequence
  Antisense oligonucleotide
uuggcuccugaacu

SEQ ID NO: 2492 - RNA, 14 nt, Artificial Sequence
  Antisense oligonucleotide
ccuguccacccauc

SEQ ID NO: 2493 - RNA, 14 nt, Artificial Sequence
  Antisense oligonucleotide
ccgacgagcagcga

SEQ ID NO: 2494 - RNA, 14 nt, Artificial Sequence
  Antisense oligonucleotide
ugcaacgauccgua

SEQ ID NO: 2495 - RNA, 14 nt, Artificial Sequence
  Antisense oligonucleotide
uuggcuccugaacu

SEQ ID NO: 2496 - RNA, 14 nt, Artificial Sequence
  Antisense oligonucleotide
ccuguccacccauc

SEQ ID NO: 2497 - RNA, 14 nt, Artificial Sequence
  Antisense oligonucleotide
ugcaacgauccgua

SEQ ID NO: 2498 - RNA, 14 nt, Artificial Sequence
  Antisense oligonucleotide
uuggcuccugaacu

SEQ ID NO: 2499 - RNA, 14 nt, Artificial Sequence
  Antisense oligonucleotide
ccuguccacccauc

SEQ ID NO: 2500 - RNA, 14 nt, Artificial Sequence
  Antisense oligonucleotide
ccgacgagcagcga

SEQ ID NO: 2501 - RNA, 14 nt, Artificial Sequence
  Antisense oligonucleotide
ugcaacgauccgua

SEQ ID NO: 2502 - RNA, 14 nt, Artificial Sequence
  Antisense oligonucleotide
uuggcuccugaacu

SEQ ID NO: 2503 - RNA, 14 nt, Artificial Sequence
  Antisense oligonucleotide
ccuguccacccauc

SEQ ID NO: 2504 - RNA, 14 nt, Artificial Sequence
  Antisense oligonucleotide
ccgacgagcagcga

SEQ ID NO: 2505 - RNA, 14 nt, Artificial Sequence
  Antisense oligonucleotide
ugcaacgauccgua

SEQ ID NO: 2506 - RNA, 14 nt, Artificial Sequence
  Antisense oligonucleotide
uuggcuccugaacu

SEQ ID NO: 2507 - RNA, 14 nt, Artificial Sequence
  Antisense oligonucleotide
ccuguccacccauc

SEQ ID NO: 2508 - RNA, 14 nt, Artificial Sequence
  Antisense oligonucleotide
ccgacgagcagcga

SEQ ID NO: 2509 - RNA, 14 nt, Artificial Sequence
  Antisense oligonucleotide
ugcaacgauccgua

SEQ ID NO: 2510 - RNA, 14 nt, Artificial Sequence
  Antisense oligonucleotide
uuggcuccugaacu

SEQ ID NO: 2511 - RNA, 14 nt, Artificial Sequence
  Antisense oligonucleotide
ccuguccacccauc

SEQ ID NO: 2512 - RNA, 14 nt, Artificial Sequence
  Antisense oligonucleotide
ugcaacgauccgua

SEQ ID NO: 2513 - RNA, 14 nt, Artificial Sequence
  Antisense oligonucleotide
uuggcuccugaacu

SEQ ID NO: 2514 - RNA, 14 nt, Artificial Sequence
  Antisense oligonucleotide
ccuguccacccauc

SEQ ID NO: 2515 - RNA, 14 nt, Artificial Sequence
  Antisense oligonucleotide
ccgacgagcagcga

SEQ ID NO: 2516 - RNA, 14 nt, Artificial Sequence
  Antisense oligonucleotide
ugcaacgauccgua

SEQ ID NO: 2517 - RNA, 14 nt, Artificial Sequence
  Antisense oligonucleotide
ccgacgagcagcga

SEQ ID NO: 2518 - RNA, 14 nt, Artificial Sequence
  Antisense oligonucleotide
ugcaacgauccgua

SEQ ID NO: 2519 - RNA, 14 nt, Artificial Sequence
  Antisense oligonucleotide
uuggcuccugaacu

SEQ ID NO: 2520 - RNA, 14 nt, Artificial Sequence
  Antisense oligonucleotide
ccuguccacccauc

SEQ ID NO: 2521 - RNA, 14 nt, Artificial Sequence
  Antisense oligonucleotide
ccgacgagcagcga

SEQ ID NO: 2522 - RNA, 14 nt, Artificial Sequence
  Antisense oligonucleotide
ugcaacgauccgua

SEQ ID NO: 2523 - RNA, 14 nt, Artificial Sequence
  Antisense oligonucleotide
uuggcuccugaacu

SEQ ID NO: 2524 - RNA, 14 nt, Artificial Sequence
  Antisense oligonucleotide
ccuguccacccauc

SEQ ID NO: 2525 - RNA, 14 nt, Artificial Sequence
  Antisense oligonucleotide
ugcaacgauccgua

SEQ ID NO: 2526 - RNA, 14 nt, Artificial Sequence
  Antisense oligonucleotide
uuggcuccugaacu

SEQ ID NO: 2527 - RNA, 14 nt, Artificial Sequence
  Antisense oligonucleotide
ccuguccacccauc

SEQ ID NO: 2528 - RNA, 14 nt, Artificial Sequence
  Antisense oligonucleotide
ccgacgagcagcga

SEQ ID NO: 2529 - RNA, 14 nt, Artificial Sequence
  Antisense oligonucleotide
ugcaacgauccgua

SEQ ID NO: 2530 - RNA, 14 nt, Artificial Sequence
  Antisense oligonucleotide
uuggcuccugaacu

SEQ ID NO: 2531 - RNA, 14 nt, Artificial Sequence
  Antisense oligonucleotide
ccuguccacccauc

SEQ ID NO: 2532 - RNA, 14 nt, Artificial Sequence
  Antisense oligonucleotide
ccgacgagcagcga

SEQ ID NO: 2533 - RNA, 14 nt, Artificial Sequence
  Antisense oligonucleotide
ugcaacgauccgua

SEQ ID NO: 2534 - RNA, 14 nt, Artificial Sequence
  Antisense oligonucleotide
uuggcuccugaacu

SEQ ID NO: 2535 - RNA, 14 nt, Artificial Sequence
  Antisense oligonucleotide
ccuguccacccauc

SEQ ID NO: 2536 - RNA, 14 nt, Artificial Sequence
  Antisense oligonucleotide
ccgacgagcagcga

SEQ ID NO: 2537 - RNA, 14 nt, Artificial Sequence
  Antisense oligonucleotide
ugcaacgauccgua

SEQ ID NO: 2538 - RNA, 14 nt, Artificial Sequence
  Antisense oligonucleotide
uuggcuccugaacu

SEQ ID NO: 2539 - RNA, 14 nt, Artificial Sequence
  Antisense oligonucleotide
ccuguccacccauc

SEQ ID NO: 2540 - RNA, 14 nt, Artificial Sequence
  Antisense oligonucleotide
ugcaacgauccgua

SEQ ID NO: 2541 - RNA, 14 nt, Artificial Sequence
  Antisense oligonucleotide
ccgacgagcagcga

SEQ ID NO: 2542 - RNA, 14 nt, Artificial Sequence
  Antisense oligonucleotide
ugcaacgauccgua

SEQ ID NO: 2543 - RNA, 14 nt, Artificial Sequence
  Antisense oligonucleotide
uuggcuccugaacu

SEQ ID NO: 2544 - RNA, 14 nt, Artificial Sequence
  Antisense oligonucleotide
ccuguccacccauc

SEQ ID NO: 2545 - RNA, 14 nt, Artificial Sequence
  Antisense oligonucleotide
ccgacgagcagcga

SEQ ID NO: 2546 - RNA, 14 nt, Artificial Sequence
  Antisense oligonucleotide
ugcaacgauccgua

SEQ ID NO: 2547 - RNA, 14 nt, Artificial Sequence
  Antisense oligonucleotide
uuggcuccugaacu

SEQ ID NO: 2548 - RNA, 14 nt, Artificial Sequence
  Antisense oligonucleotide
ccuguccacccauc

SEQ ID NO: 2549 - RNA, 14 nt, Artificial Sequence
  Antisense oligonucleotide
ugcaacgauccgua

SEQ ID NO: 2550 - RNA, 14 nt, Artificial Sequence
  Antisense oligonucleotide
uuggcuccugaacu

SEQ ID NO: 2551 - RNA, 14 nt, Artificial Sequence
  Antisense oligonucleotide
ccuguccacccauc

SEQ ID NO: 2552 - RNA, 14 nt, Artificial Sequence
  Antisense oligonucleotide
ccgacgagcagcga

SEQ ID NO: 2553 - RNA, 14 nt, Artificial Sequence
  Antisense oligonucleotide
ugcaacgauccgua

SEQ ID NO: 2554 - RNA, 14 nt, Artificial Sequence
  Antisense oligonucleotide
uuggcuccugaacu

SEQ ID NO: 2555 - RNA, 14 nt, Artificial Sequence
  Antisense oligonucleotide
ccuguccacccauc

SEQ ID NO: 2556 - RNA, 14 nt, Artificial Sequence
  Antisense oligonucleotide
ccgacgagcagcga

SEQ ID NO: 2557 - RNA, 14 nt, Artificial Sequence
  Antisense oligonucleotide
ugcaacgauccgua

SEQ ID NO: 2558 - RNA, 14 nt, Artificial Sequence
  Antisense oligonucleotide
uuggcuccugaacu

SEQ ID NO: 2559 - RNA, 14 nt, Artificial Sequence
  Antisense oligonucleotide
ccuguccacccauc

SEQ ID NO: 2560 - RNA, 14 nt, Artificial Sequence
  Antisense oligonucleotide
ccgacgagcagcga

SEQ ID NO: 2561 - RNA, 14 nt, Artificial Sequence
  Antisense oligonucleotide
ugcaacgauccgua

SEQ ID NO: 2562 - RNA, 14 nt, Artificial Sequence
  Antisense oligonucleotide
uuggcuccugaacu

SEQ ID NO: 2563 - RNA, 14 nt, Artificial Sequence
  Antisense oligonucleotide
ccuguccacccauc

SEQ ID NO: 2564 - RNA, 14 nt, Artificial Sequence
  Antisense oligonucleotide
ugcaacgauccgua

SEQ ID NO: 2565 - RNA, 14 nt, Artificial Sequence
  Antisense oligonucleotide
uuggcuccugaacu

SEQ ID NO: 2566 - RNA, 14 nt, Artificial Sequence
  Antisense oligonucleotide
ccuguccacccauc

SEQ ID NO: 2567 - RNA, 14 nt, Artificial Sequence
  Antisense oligonucleotide
ccgacgagcagcga

SEQ ID NO: 2568 - RNA, 14 nt, Artificial Sequence
  Antisense oligonucleotide
ugcaacgauccgua

SEQ ID NO: 2569 - RNA, 14 nt, Artificial Sequence
  Antisense oligonucleotide
ccgacgagcagcga

SEQ ID NO: 2570 - RNA, 14 nt, Artificial Sequence
  Antisense oligonucleotide
ugcaacgauccgua

SEQ ID NO: 2571 - RNA, 14 nt, Artificial Sequence
  Antisense oligonucleotide
uuggcuccugaacu

SEQ ID NO: 2572 - RNA, 14 nt, Artificial Sequence
  Antisense oligonucleotide
ccuguccacccauc

SEQ ID NO: 2573 - RNA, 14 nt, Artificial Sequence
  Antisense oligonucleotide
ccgacgagcagcga

SEQ ID NO: 2574 - RNA, 14 nt, Artificial Sequence
  Antisense oligonucleotide
ugcaacgauccgua

SEQ ID NO: 2575 - RNA, 14 nt, Artificial Sequence
  Antisense oligonucleotide
uuggcuccugaacu

SEQ ID NO: 2576 - RNA, 14 nt, Artificial Sequence
  Antisense oligonucleotide
ccuguccacccauc

SEQ ID NO: 2577 - RNA, 14 nt, Artificial Sequence
  Antisense oligonucleotide
ugcaacgauccgua

SEQ ID NO: 2578 - RNA, 14 nt, Artificial Sequence
  Antisense oligonucleotide
uuggcuccugaacu

SEQ ID NO: 2579 - RNA, 14 nt, Artificial Sequence
  Antisense oligonucleotide
ccuguccacccauc

SEQ ID NO: 2580 - RNA, 14 nt, Artificial Sequence
  Antisense oligonucleotide
ccgacgagcagcga

SEQ ID NO: 2581 - RNA, 14 nt, Artificial Sequence
  Antisense oligonucleotide
ugcaacgauccgua

SEQ ID NO: 2582 - RNA, 14 nt, Artificial Sequence
  Antisense oligonucleotide
uuggcuccugaacu

SEQ ID NO: 2583 - RNA, 14 nt, Artificial Sequence
  Antisense oligonucleotide
ccuguccacccauc

SEQ ID NO: 2584 - RNA, 14 nt, Artificial Sequence
  Antisense oligonucleotide
ccgacgagcagcga

SEQ ID NO: 2585 - RNA, 14 nt, Artificial Sequence
  Antisense oligonucleotide
ugcaacgauccgua

SEQ ID NO: 2586 - RNA, 14 nt, Artificial Sequence
  Antisense oligonucleotide
uuggcuccugaacu

SEQ ID NO: 2587 - RNA, 14 nt, Artificial Sequence
  Antisense oligonucleotide
ccuguccacccauc

SEQ ID NO: 2588 - RNA, 14 nt, Artificial Sequence
  Antisense oligonucleotide
ccgacgagcagcga

SEQ ID NO: 2589 - RNA, 14 nt, Artificial Sequence
  Antisense oligonucleotide
ugcaacgauccgua

SEQ ID NO: 2590 - RNA, 14 nt, Artificial Sequence
  Antisense oligonucleotide
uuggcuccugaacu

SEQ ID NO: 2591 - RNA, 14 nt, Artificial Sequence
  Antisense oligonucleotide
ccuguccacccauc

SEQ ID NO: 2592 - RNA, 14 nt, Artificial Sequence
  Antisense oligonucleotide
ugcaacgauccgua

SEQ ID NO: 2593 - RNA, 14 nt, Artificial Sequence
  Antisense oligonucleotide
uuggcuccugaacu

SEQ ID NO: 2594 - RNA, 14 nt, Artificial Sequence
  Antisense oligonucleotide
ccuguccacccauc

SEQ ID NO: 2595 - RNA, 14 nt, Artificial Sequence
  Antisense oligonucleotide
ccgacgagcagcga

SEQ ID NO: 2596 - RNA, 14 nt, Artificial Sequence
  Antisense oligonucleotide
ugcaacgauccgua

SEQ ID NO: 2597 - RNA, 14 nt, Artificial Sequence
  Antisense oligonucleotide
uuggcuccugaacu

SEQ ID NO: 2598 - RNA, 14 nt, Artificial Sequence
  Antisense oligonucleotide
ccuguccacccauc

SEQ ID NO: 2599 - RNA, 14 nt, Artificial Sequence
  Antisense oligonucleotide
ccccugugcucacu

SEQ ID NO: 2600 - RNA, 14 nt, Artificial Sequence
  Antisense oligonucleotide
ccgacgagcagcga

SEQ ID NO: 2601 - RNA, 14 nt, Artificial Sequence
  Antisense oligonucleotide
ugcaacgauccgua

SEQ ID NO: 2602 - RNA, 14 nt, Artificial Sequence
  Antisense oligonucleotide
uuggcuccugaacu

SEQ ID NO: 2603 - RNA, 14 nt, Artificial Sequence
  Antisense oligonucleotide
ccuguccacccauc

SEQ ID NO: 2604 - RNA, 14 nt, Artificial Sequence
  Antisense oligonucleotide
ccgacgagcagcga

SEQ ID NO: 2605 - RNA, 14 nt, Artificial Sequence
  Antisense oligonucleotide
ugcaacgauccgua

SEQ ID NO: 2606 - RNA, 14 nt, Artificial Sequence
  Antisense oligonucleotide
uuggcuccugaacu

SEQ ID NO: 2607 - RNA, 14 nt, Artificial Sequence
  Antisense oligonucleotide
ccuguccacccauc

SEQ ID NO: 2608 - RNA, 14 nt, Artificial Sequence
  Antisense oligonucleotide
ugcaacgauccgua

SEQ ID NO: 2609 - RNA, 14 nt, Artificial Sequence
  Antisense oligonucleotide
uuggcuccugaacu

SEQ ID NO: 2610 - RNA, 14 nt, Artificial Sequence
  Antisense oligonucleotide
ccuguccacccauc

SEQ ID NO: 2611 - RNA, 14 nt, Artificial Sequence
  Antisense oligonucleotide
ccgacgagcagcga

SEQ ID NO: 2612 - RNA, 14 nt, Artificial Sequence
  Antisense oligonucleotide
ugcaacgauccgua

SEQ ID NO: 2613 - RNA, 14 nt, Artificial Sequence
  Antisense oligonucleotide
uuggcuccugaacu

SEQ ID NO: 2614 - RNA, 14 nt, Artificial Sequence
  Antisense oligonucleotide
ccuguccacccauc

SEQ ID NO: 2615 - RNA, 14 nt, Artificial Sequence
  Antisense oligonucleotide
ccgacgagcagcga

SEQ ID NO: 2616 - RNA, 14 nt, Artificial Sequence
  Antisense oligonucleotide
ugcaacgauccgua

SEQ ID NO: 2617 - RNA, 14 nt, Artificial Sequence
  Antisense oligonucleotide
uuggcuccugaacu

SEQ ID NO: 2618 - RNA, 14 nt, Artificial Sequence
  Antisense oligonucleotide
ccuguccacccauc

SEQ ID NO: 2619 - RNA, 14 nt, Artificial Sequence
  Antisense oligonucleotide
ccgacgagcagcga

SEQ ID NO: 2620 - RNA, 14 nt, Artificial Sequence
  Antisense oligonucleotide
ugcaacgauccgua

SEQ ID NO: 2621 - RNA, 14 nt, Artificial Sequence
  Antisense oligonucleotide
uuggcuccugaacu

SEQ ID NO: 2622 - RNA, 14 nt, Artificial Sequence
  Antisense oligonucleotide
ccuguccacccauc

SEQ ID NO: 2623 - RNA, 14 nt, Artificial Sequence
  Antisense oligonucleotide
ugcaacgauccgua

SEQ ID NO: 2624 - RNA, 14 nt, Artificial Sequence
  Antisense oligonucleotide
uuggcuccugaacu

SEQ ID NO: 2625 - RNA, 14 nt, Artificial Sequence
  Antisense oligonucleotide
ccuguccacccauc

SEQ ID NO: 2626 - RNA, 14 nt, Artificial Sequence
  Antisense oligonucleotide
ccgacgagcagcga

SEQ ID NO: 2627 - RNA, 14 nt, Artificial Sequence
  Antisense oligonucleotide
ugcaacgauccgua

SEQ ID NO: 2628 - RNA, 14 nt, Artificial Sequence
  Antisense oligonucleotide
ccgacgagcagcga

SEQ ID NO: 2629 - RNA, 14 nt, Artificial Sequence
  Antisense oligonucleotide
ugcaacgauccgua

SEQ ID NO: 2630 - RNA, 14 nt, Artificial Sequence
  Antisense oligonucleotide
uuggcuccugaacu

SEQ ID NO: 2631 - RNA, 14 nt, Artificial Sequence
  Antisense oligonucleotide
ccuguccacccauc

SEQ ID NO: 2632 - RNA, 14 nt, Artificial Sequence
  Antisense oligonucleotide
ccgacgagcagcga

SEQ ID NO: 2633 - RNA, 14 nt, Artificial Sequence
  Antisense oligonucleotide
ugcaacgauccgua

SEQ ID NO: 2634 - RNA, 14 nt, Artificial Sequence
  Antisense oligonucleotide
uuggcuccugaacu

SEQ ID NO: 2635 - RNA, 14 nt, Artificial Sequence
  Antisense oligonucleotide
ccuguccacccauc

SEQ ID NO: 2636 - RNA, 14 nt, Artificial Sequence
  Antisense oligonucleotide
ugcaacgauccgua

SEQ ID NO: 2637 - RNA, 14 nt, Artificial Sequence
  Antisense oligonucleotide
uuggcuccugaacu

SEQ ID NO: 2638 - RNA, 14 nt, Artificial Sequence
  Antisense oligonucleotide
ccuguccacccauc

SEQ ID NO: 2639 - RNA, 14 nt, Artificial Sequence
  Antisense oligonucleotide
ccgacgagcagcga

SEQ ID NO: 2640 - RNA, 14 nt, Artificial Sequence
  Antisense oligonucleotide
ugcaacgauccgua

SEQ ID NO: 2641 - RNA, 14 nt, Artificial Sequence
  Antisense oligonucleotide
uuggcuccugaacu

SEQ ID NO: 2642 - RNA, 14 nt, Artificial Sequence
  Antisense oligonucleotide
ccuguccacccauc

SEQ ID NO: 2643 - RNA, 14 nt, Artificial Sequence
  Antisense oligonucleotide
ccgacgagcagcga

SEQ ID NO: 2644 - RNA, 14 nt, Artificial Sequence
  Antisense oligonucleotide
ugcaacgauccgua

SEQ ID NO: 2645 - RNA, 14 nt, Artificial Sequence
  Antisense oligonucleotide
uuggcuccugaacu

SEQ ID NO: 2646 - RNA, 14 nt, Artificial Sequence
  Antisense oligonucleotide
ccuguccacccauc

SEQ ID NO: 2647 - RNA, 14 nt, Artificial Sequence
  Antisense oligonucleotide
ccgacgagcagcga

SEQ ID NO: 2648 - RNA, 14 nt, Artificial Sequence
  Antisense oligonucleotide
ugcaacgauccgua

SEQ ID NO: 2649 - RNA, 14 nt, Artificial Sequence
  Antisense oligonucleotide
uuggcuccugaacu

SEQ ID NO: 2650 - RNA, 14 nt, Artificial Sequence
  Antisense oligonucleotide
ccuguccacccauc

SEQ ID NO: 2651 - RNA, 14 nt, Artificial Sequence
  Antisense oligonucleotide
ugcaacgauccgua

SEQ ID NO: 2652 - RNA, 14 nt, Artificial Sequence
  Antisense oligonucleotide
uuggcuccugaacu

SEQ ID NO: 2653 - RNA, 14 nt, Artificial Sequence
  Antisense oligonucleotide
ccuguccacccauc

SEQ ID NO: 2654 - RNA, 14 nt, Artificial Sequence
  Antisense oligonucleotide
ccgacgagcagcga

SEQ ID NO: 2655 - RNA, 14 nt, Artificial Sequence
  Antisense oligonucleotide
ugcaacgauccgua

SEQ ID NO: 2656 - RNA, 14 nt, Artificial Sequence
  Antisense oligonucleotide
uuggcuccugaacu

SEQ ID NO: 2657 - RNA, 14 nt, Artificial Sequence
  Antisense oligonucleotide
ccuguccacccauc

SEQ ID NO: 2658 - RNA, 14 nt, Artificial Sequence
  Antisense oligonucleotide
ccccugugcucacu

SEQ ID NO: 2659 - RNA, 14 nt, Artificial Sequence
  Antisense oligonucleotide
ccgacgagcagcga

SEQ ID NO: 2660 - RNA, 14 nt, Artificial Sequence
  Antisense oligonucleotide
ugcaacgauccgua

SEQ ID NO: 2661 - RNA, 14 nt, Artificial Sequence
  Antisense oligonucleotide
uuggcuccugaacu

SEQ ID NO: 2662 - RNA, 14 nt, Artificial Sequence
  Antisense oligonucleotide
ccuguccacccauc

SEQ ID NO: 2663 - RNA, 14 nt, Artificial Sequence
  Antisense oligonucleotide
ccgacgagcagcga

SEQ ID NO: 2664 - RNA, 14 nt, Artificial Sequence
  Antisense oligonucleotide
ugcaacgauccgua

SEQ ID NO: 2665 - RNA, 14 nt, Artificial Sequence
  Antisense oligonucleotide
uuggcuccugaacu

SEQ ID NO: 2666 - RNA, 14 nt, Artificial Sequence
  Antisense oligonucleotide
ccuguccacccauc

SEQ ID NO: 2667 - RNA, 14 nt, Artificial Sequence
  Antisense oligonucleotide
ccgacgagcagcga

SEQ ID NO: 2668 - RNA, 14 nt, Artificial Sequence
  Antisense oligonucleotide
ugcaacgauccgua

SEQ ID NO: 2669 - RNA, 14 nt, Artificial Sequence
  Antisense oligonucleotide
uuggcuccugaacu

SEQ ID NO: 2670 - RNA, 14 nt, Artificial Sequence
  Antisense oligonucleotide
ccuguccacccauc

SEQ ID NO: 2671 - RNA, 14 nt, Artificial Sequence
  Antisense oligonucleotide
ugcaacgauccgua

SEQ ID NO: 2672 - RNA, 14 nt, Artificial Sequence
  Antisense oligonucleotide
uuggcuccugaacu

SEQ ID NO: 2673 - RNA, 14 nt, Artificial Sequence
  Antisense oligonucleotide
ccuguccacccauc

SEQ ID NO: 2674 - RNA, 14 nt, Artificial Sequence
  Antisense oligonucleotide
ccgacgagcagcga

SEQ ID NO: 2675 - RNA, 14 nt, Artificial Sequence
  Antisense oligonucleotide
ugcaacgauccgua

SEQ ID NO: 2676 - RNA, 14 nt, Artificial Sequence
  Antisense oligonucleotide
ccgacgagcagcga

SEQ ID NO: 2677 - RNA, 14 nt, Artificial Sequence
  Antisense oligonucleotide
ugcaacgauccgua

SEQ ID NO: 2678 - RNA, 14 nt, Artificial Sequence
  Antisense oligonucleotide
uuggcuccugaacu

SEQ ID NO: 2679 - RNA, 14 nt, Artificial Sequence
  Antisense oligonucleotide
ccuguccacccauc

SEQ ID NO: 2680 - RNA, 14 nt, Artificial Sequence
  Antisense oligonucleotide
ccgacgagcagcga

SEQ ID NO: 2681 - RNA, 14 nt, Artificial Sequence
  Antisense oligonucleotide
ugcaacgauccgua

SEQ ID NO: 2682 - RNA, 14 nt, Artificial Sequence
  Antisense oligonucleotide
uuggcuccugaacu

SEQ ID NO: 2683 - RNA, 14 nt, Artificial Sequence
  Antisense oligonucleotide
ccuguccacccauc

SEQ ID NO: 2684 - RNA, 14 nt, Artificial Sequence
  Antisense oligonucleotide
ugcaacgauccgua

SEQ ID NO: 2685 - RNA, 14 nt, Artificial Sequence
  Antisense oligonucleotide
uuggcuccugaacu

SEQ ID NO: 2686 - RNA, 14 nt, Artificial Sequence
  Antisense oligonucleotide
ccuguccacccauc

SEQ ID NO: 2687 - RNA, 14 nt, Artificial Sequence
  Antisense oligonucleotide
ccgacgagcagcga

SEQ ID NO: 2688 - RNA, 14 nt, Artificial Sequence
  Antisense oligonucleotide
ugcaacgauccgua

SEQ ID NO: 2689 - RNA, 14 nt, Artificial Sequence
  Antisense oligonucleotide
uuggcuccugaacu

SEQ ID NO: 2690 - RNA, 14 nt, Artificial Sequence
  Antisense oligonucleotide
ccuguccacccauc

SEQ ID NO: 2691 - RNA, 14 nt, Artificial Sequence
  Antisense oligonucleotide
ccgacgagcagcga

SEQ ID NO: 2692 - RNA, 14 nt, Artificial Sequence
  Antisense oligonucleotide
ugcaacgauccgua

SEQ ID NO: 2693 - RNA, 14 nt, Artificial Sequence
  Antisense oligonucleotide
uuggcuccugaacu

SEQ ID NO: 2694 - RNA, 14 nt, Artificial Sequence
  Antisense oligonucleotide
ccuguccacccauc

SEQ ID NO: 2695 - RNA, 14 nt, Artificial Sequence
  Antisense oligonucleotide
ccgacgagcagcga

SEQ ID NO: 2696 - RNA, 14 nt, Artificial Sequence
  Antisense oligonucleotide
ugcaacgauccgua

SEQ ID NO: 2697 - RNA, 14 nt, Artificial Sequence
  Antisense oligonucleotide
uuggcuccugaacu

SEQ ID NO: 2698 - RNA, 14 nt, Artificial Sequence
  Antisense oligonucleotide
ccuguccacccauc

SEQ ID NO: 2699 - RNA, 14 nt, Artificial Sequence
  Antisense oligonucleotide
ugcaacgauccgua

SEQ ID NO: 2700 - RNA, 14 nt, Artificial Sequence
  Antisense oligonucleotide
uuggcuccugaacu

SEQ ID NO: 2701 - RNA, 14 nt, Artificial Sequence
  Antisense oligonucleotide
ccuguccacccauc

SEQ ID NO: 2702 - RNA, 14 nt, Artificial Sequence
  Antisense oligonucleotide
ccgacgagcagcga

SEQ ID NO: 2703 - RNA, 14 nt, Artificial Sequence
  Antisense oligonucleotide
ugcaacgauccgua

SEQ ID NO: 2704 - RNA, 14 nt, Artificial Sequence
  Antisense oligonucleotide
uuggcuccugaacu

SEQ ID NO: 2705 - RNA, 14 nt, Artificial Sequence
  Antisense oligonucleotide
ccuguccacccauc

SEQ ID NO: 2706 - RNA, 14 nt, Artificial Sequence
  Antisense oligonucleotide
ccccugugcucacu

SEQ ID NO: 2707 - RNA, 14 nt, Artificial Sequence
  Antisense oligonucleotide
ccgacgagcagcga

SEQ ID NO: 2708 - RNA, 14 nt, Artificial Sequence
  Antisense oligonucleotide
ugcaacgauccgua

SEQ ID NO: 2709 - RNA, 14 nt, Artificial Sequence
  Antisense oligonucleotide
uuggcuccugaacu

SEQ ID NO: 2710 - RNA, 14 nt, Artificial Sequence
  Antisense oligonucleotide
ccuguccacccauc

SEQ ID NO: 2711 - RNA, 14 nt, Artificial Sequence
  Antisense oligonucleotide
ccgacgagcagcga

SEQ ID NO: 2712 - RNA, 14 nt, Artificial Sequence
  Antisense oligonucleotide
ugcaacgauccgua

SEQ ID NO: 2713 - RNA, 14 nt, Artificial Sequence
  Antisense oligonucleotide
uuggcuccugaacu

SEQ ID NO: 2714 - RNA, 14 nt, Artificial Sequence
  Antisense oligonucleotide
ccuguccacccauc

SEQ ID NO: 2715 - RNA, 14 nt, Artificial Sequence
  Antisense oligonucleotide
ugcaacgauccgua

SEQ ID NO: 2716 - RNA, 14 nt, Artificial Sequence
  Antisense oligonucleotide
uuggcuccugaacu

SEQ ID NO: 2717 - RNA, 14 nt, Artificial Sequence
  Antisense oligonucleotide
ccuguccacccauc

SEQ ID NO: 2718 - RNA, 14 nt, Artificial Sequence
  Antisense oligonucleotide
ccgacgagcagcga

SEQ ID NO: 2719 - RNA, 14 nt, Artificial Sequence
  Antisense oligonucleotide
ugcaacgauccgua

SEQ ID NO: 2720 - RNA, 14 nt, Artificial Sequence
  Antisense oligonucleotide
uuggcuccugaacu

SEQ ID NO: 2721 - RNA, 14 nt, Artificial Sequence
  Antisense oligonucleotide
ccuguccacccauc

SEQ ID NO: 2722 - RNA, 14 nt, Artificial Sequence
  Antisense oligonucleotide
ccgacgagcagcga

SEQ ID NO: 2723 - RNA, 14 nt, Artificial Sequence
  Antisense oligonucleotide
ugcaacgauccgua

SEQ ID NO: 2724 - RNA, 14 nt, Artificial Sequence
  Antisense oligonucleotide
uuggcuccugaacu

SEQ ID NO: 2725 - RNA, 14 nt, Artificial Sequence
  Antisense oligonucleotide
ccuguccacccauc

SEQ ID NO: 2726 - RNA, 14 nt, Artificial Sequence
  Antisense oligonucleotide
ccgacgagcagcga

SEQ ID NO: 2727 - RNA, 14 nt, Artificial Sequence
  Antisense oligonucleotide
ugcaacgauccgua

SEQ ID NO: 2728 - RNA, 14 nt, Artificial Sequence
  Antisense oligonucleotide
uuggcuccugaacu

SEQ ID NO: 2729 - RNA, 14 nt, Artificial Sequence
  Antisense oligonucleotide
ccuguccacccauc

SEQ ID NO: 2730 - RNA, 14 nt, Artificial Sequence
  Antisense oligonucleotide
ugcaacgauccgua

SEQ ID NO: 2731 - RNA, 14 nt, Artificial Sequence
  Antisense oligonucleotide
uuggcuccugaacu

SEQ ID NO: 2732 - RNA, 14 nt, Artificial Sequence
  Antisense oligonucleotide
ccuguccacccauc

SEQ ID NO: 2733 - RNA, 14 nt, Artificial Sequence
  Antisense oligonucleotide
ccgacgagcagcga

SEQ ID NO: 2734 - RNA, 14 nt, Artificial Sequence
  Antisense oligonucleotide
ugcaacgauccgua

SEQ ID NO: 2735 - RNA, 14 nt, Artificial Sequence
  Antisense oligonucleotide
ccgacgagcagcga

SEQ ID NO: 2736 - RNA, 14 nt, Artificial Sequence
  Antisense oligonucleotide
ugcaacgauccgua

SEQ ID NO: 2737 - RNA, 14 nt, Artificial Sequence
  Antisense oligonucleotide
uuggcuccugaacu

SEQ ID NO: 2738 - RNA, 14 nt, Artificial Sequence
  Antisense oligonucleotide
ccuguccacccauc

SEQ ID NO: 2739 - RNA, 14 nt, Artificial Sequence
  Antisense oligonucleotide
ccgacgagcagcga

SEQ ID NO: 2740 - RNA, 14 nt, Artificial Sequence
  Antisense oligonucleotide
ugcaacgauccgua

SEQ ID NO: 2741 - RNA, 14 nt, Artificial Sequence
  Antisense oligonucleotide
uuggcuccugaacu

SEQ ID NO: 2742 - RNA, 14 nt, Artificial Sequence
  Antisense oligonucleotide
ccuguccacccauc

SEQ ID NO: 2743 - RNA, 14 nt, Artificial Sequence
  Antisense oligonucleotide
ugcaacgauccgua

SEQ ID NO: 2744 - RNA, 14 nt, Artificial Sequence
  Antisense oligonucleotide
uuggcuccugaacu

SEQ ID NO: 2745 - RNA, 14 nt, Artificial Sequence
  Antisense oligonucleotide
ccuguccacccauc

SEQ ID NO: 2746 - RNA, 14 nt, Artificial Sequence
  Antisense oligonucleotide
ccgacgagcagcga

SEQ ID NO: 2747 - RNA, 14 nt, Artificial Sequence
  Antisense oligonucleotide
ugcaacgauccgua

SEQ ID NO: 2748 - RNA, 14 nt, Artificial Sequence
  Antisense oligonucleotide
uuggcuccugaacu

SEQ ID NO: 2749 - RNA, 14 nt, Artificial Sequence
  Antisense oligonucleotide
ccuguccacccauc

SEQ ID NO: 2750 - RNA, 14 nt, Artificial Sequence
  Antisense oligonucleotide
ccgacgagcagcga

SEQ ID NO: 2751 - RNA, 14 nt, Artificial Sequence
  Antisense oligonucleotide
ugcaacgauccgua

SEQ ID NO: 2752 - RNA, 14 nt, Artificial Sequence
  Antisense oligonucleotide
uuggcuccugaacu

SEQ ID NO: 2753 - RNA, 14 nt, Artificial Sequence
  Antisense oligonucleotide
ccuguccacccauc

SEQ ID NO: 2754 - RNA, 14 nt, Artificial Sequence
  Antisense oligonucleotide
ccgacgagcagcga

SEQ ID NO: 2755 - RNA, 14 nt, Artificial Sequence
  Antisense oligonucleotide
ugcaacgauccgua

SEQ ID NO: 2756 - RNA, 14 nt, Artificial Sequence
  Antisense oligonucleotide
uuggcuccugaacu

SEQ ID NO: 2757 - RNA, 14 nt, Artificial Sequence
  Antisense oligonucleotide
ccuguccacccauc

SEQ ID NO: 2758 - RNA, 14 nt, Artificial Sequence
  Antisense oligonucleotide
ugcaacgauccgua

SEQ ID NO: 2759 - RNA, 14 nt, Artificial Sequence
  Antisense oligonucleotide
uuggcuccugaacu

SEQ ID NO: 2760 - RNA, 14 nt, Artificial Sequence
  Antisense oligonucleotide
ccuguccacccauc

SEQ ID NO: 2761 - RNA, 14 nt, Artificial Sequence
  Antisense oligonucleotide
ccgacgagcagcga

SEQ ID NO: 2762 - RNA, 14 nt, Artificial Sequence
  Antisense oligonucleotide
ugcaacgauccgua

SEQ ID NO: 2763 - RNA, 14 nt, Artificial Sequence
  Antisense oligonucleotide
ccgacgagcagcga

SEQ ID NO: 2764 - RNA, 14 nt, Artificial Sequence
  Antisense oligonucleotide
ugcaacgauccgua

SEQ ID NO: 2765 - RNA, 14 nt, Artificial Sequence
  Antisense oligonucleotide
uuggcuccugaacu

SEQ ID NO: 2766 - RNA, 14 nt, Artificial Sequence
  Antisense oligonucleotide
ccuguccacccauc

SEQ ID NO: 2767 - RNA, 14 nt, Artificial Sequence
  Antisense oligonucleotide
ccgacgagcagcga

SEQ ID NO: 2768 - RNA, 14 nt, Artificial Sequence
  Antisense oligonucleotide
ugcaacgauccgua

SEQ ID NO: 2769 - RNA, 14 nt, Artificial Sequence
  Antisense oligonucleotide
uuggcuccugaacu

SEQ ID NO: 2770 - RNA, 14 nt, Artificial Sequence
  Antisense oligonucleotide
ccuguccacccauc

SEQ ID NO: 2771 - RNA, 14 nt, Artificial Sequence
  Antisense oligonucleotide
ugcaacgauccgua

SEQ ID NO: 2772 - RNA, 14 nt, Artificial Sequence
  Antisense oligonucleotide
uuggcuccugaacu

SEQ ID NO: 2773 - RNA, 14 nt, Artificial Sequence
  Antisense oligonucleotide
ccuguccacccauc

SEQ ID NO: 2774 - RNA, 14 nt, Artificial Sequence
  Antisense oligonucleotide
ccgacgagcagcga

SEQ ID NO: 2775 - RNA, 14 nt, Artificial Sequence
  Antisense oligonucleotide
ugcaacgauccgua

SEQ ID NO: 2776 - RNA, 14 nt, Artificial Sequence
  Antisense oligonucleotide
uuggcuccugaacu

SEQ ID NO: 2777 - RNA, 14 nt, Artificial Sequence
  Antisense oligonucleotide
ccuguccacccauc

SEQ ID NO: 2778 - RNA, 14 nt, Artificial Sequence
  Antisense oligonucleotide
ccgacgagcagcga

SEQ ID NO: 2779 - RNA, 14 nt, Artificial Sequence
  Antisense oligonucleotide
ugcaacgauccgua

SEQ ID NO: 2780 - RNA, 14 nt, Artificial Sequence
  Antisense oligonucleotide
uuggcuccugaacu

SEQ ID NO: 2781 - RNA, 14 nt, Artificial Sequence
  Antisense oligonucleotide
ccuguccacccauc

SEQ ID NO: 2782 - RNA, 14 nt, Artificial Sequence
  Antisense oligonucleotide
ccgacgagcagcga

SEQ ID NO: 2783 - RNA, 14 nt, Artificial Sequence
  Antisense oligonucleotide
ugcaacgauccgua

SEQ ID NO: 2784 - RNA, 14 nt, Artificial Sequence
  Antisense oligonucleotide
uuggcuccugaacu

SEQ ID NO: 2785 - RNA, 14 nt, Artificial Sequence
  Antisense oligonucleotide
ccuguccacccauc

SEQ ID NO: 2786 - RNA, 14 nt, Artificial Sequence
  Antisense oligonucleotide
ugcaacgauccgua

SEQ ID NO: 2787 - RNA, 14 nt, Artificial Sequence
  Antisense oligonucleotide
uuggcuccugaacu

SEQ ID NO: 2788 - RNA, 14 nt, Artificial Sequence
  Antisense oligonucleotide
ccuguccacccauc

SEQ ID NO: 2789 - RNA, 14 nt, Artificial Sequence
  Antisense oligonucleotide
ccgacgagcagcga

SEQ ID NO: 2790 - RNA, 14 nt, Artificial Sequence
  Antisense oligonucleotide
ugcaacgauccgua

SEQ ID NO: 2791 - RNA, 14 nt, Artificial Sequence
  Antisense oligonucleotide
ccgacgagcagcga

SEQ ID NO: 2792 - RNA, 14 nt, Artificial Sequence
  Antisense oligonucleotide
ugcaacgauccgua

SEQ ID NO: 2793 - RNA, 14 nt, Artificial Sequence
  Antisense oligonucleotide
uuggcuccugaacu

SEQ ID NO: 2794 - RNA, 14 nt, Artificial Sequence
  Antisense oligonucleotide
ccuguccacccauc

SEQ ID NO: 2795 - RNA, 14 nt, Artificial Sequence
  Antisense oligonucleotide
ccgacgagcagcga

SEQ ID NO: 2796 - RNA, 14 nt, Artificial Sequence
  Antisense oligonucleotide
ugcaacgauccgua

SEQ ID NO: 2797 - RNA, 14 nt, Artificial Sequence
  Antisense oligonucleotide
uuggcuccugaacu

SEQ ID NO: 2798 - RNA, 14 nt, Artificial Sequence
  Antisense oligonucleotide
ccuguccacccauc

SEQ ID NO: 2799 - RNA, 14 nt, Artificial Sequence
  Antisense oligonucleotide
ugcaacgauccgua

SEQ ID NO: 2800 - RNA, 14 nt, Artificial Sequence
  Antisense oligonucleotide
uuggcuccugaacu

SEQ ID NO: 2801 - RNA, 14 nt, Artificial Sequence
  Antisense oligonucleotide
ccuguccacccauc

SEQ ID NO: 2802 - RNA, 14 nt, Artificial Sequence
  Antisense oligonucleotide
ccgacgagcagcga

SEQ ID NO: 2803 - RNA, 14 nt, Artificial Sequence
  Antisense oligonucleotide
ugcaacgauccgua

SEQ ID NO: 2804 - RNA, 14 nt, Artificial Sequence
  Antisense oligonucleotide
uuggcuccugaacu

SEQ ID NO: 2805 - RNA, 14 nt, Artificial Sequence
  Antisense oligonucleotide
ccuguccacccauc

SEQ ID NO: 2806 - RNA, 14 nt, Artificial Sequence
  Antisense oligonucleotide
ccgacgagcagcga

SEQ ID NO: 2807 - RNA, 14 nt, Artificial Sequence
  Antisense oligonucleotide
ugcaacgauccgua

SEQ ID NO: 2808 - RNA, 14 nt, Artificial Sequence
  Antisense oligonucleotide
uuggcuccugaacu

SEQ ID NO: 2809 - RNA, 14 nt, Artificial Sequence
  Antisense oligonucleotide
ccuguccacccauc

SEQ ID NO: 2810 - RNA, 14 nt, Artificial Sequence
  Antisense oligonucleotide
ccgacgagcagcga

SEQ ID NO: 2811 - RNA, 14 nt, Artificial Sequence
  Antisense oligonucleotide
ugcaacgauccgua

SEQ ID NO: 2812 - RNA, 14 nt, Artificial Sequence
  Antisense oligonucleotide
uuggcuccugaacu

SEQ ID NO: 2813 - RNA, 14 nt, Artificial Sequence
  Antisense oligonucleotide
ccuguccacccauc

SEQ ID NO: 2814 - RNA, 14 nt, Artificial Sequence
  Antisense oligonucleotide
ugcaacgauccgua

SEQ ID NO: 2815 - RNA, 14 nt, Artificial Sequence
  Antisense oligonucleotide
ccgacgagcagcga

SEQ ID NO: 2816 - RNA, 14 nt, Artificial Sequence
  Antisense oligonucleotide
ugcaacgauccgua

SEQ ID NO: 2817 - RNA, 14 nt, Artificial Sequence
  Antisense oligonucleotide
uuggcuccugaacu

SEQ ID NO: 2818 - RNA, 14 nt, Artificial Sequence
  Antisense oligonucleotide
ccuguccacccauc

SEQ ID NO: 2819 - RNA, 14 nt, Artificial Sequence
  Antisense oligonucleotide
ccgacgagcagcga

SEQ ID NO: 2820 - RNA, 14 nt, Artificial Sequence
  Antisense oligonucleotide
ugcaacgauccgua

SEQ ID NO: 2821 - RNA, 14 nt, Artificial Sequence
  Antisense oligonucleotide
uuggcuccugaacu

SEQ ID NO: 2822 - RNA, 14 nt, Artificial Sequence
  Antisense oligonucleotide
ccuguccacccauc

SEQ ID NO: 2823 - RNA, 14 nt, Artificial Sequence
  Antisense oligonucleotide
ugcaacgauccgua

SEQ ID NO: 2824 - RNA, 14 nt, Artificial Sequence
  Antisense oligonucleotide
uuggcuccugaacu

SEQ ID NO: 2825 - RNA, 14 nt, Artificial Sequence
  Antisense oligonucleotide
ccuguccacccauc

SEQ ID NO: 2826 - RNA, 14 nt, Artificial Sequence
  Antisense oligonucleotide
ccgacgagcagcga

SEQ ID NO: 2827 - RNA, 14 nt, Artificial Sequence
  Antisense oligonucleotide
ugcaacgauccgua

SEQ ID NO: 2828 - RNA, 14 nt, Artificial Sequence
  Antisense oligonucleotide
uuggcuccugaacu

SEQ ID NO: 2829 - RNA, 14 nt, Artificial Sequence
  Antisense oligonucleotide
ccuguccacccauc

SEQ ID NO: 2830 - RNA, 14 nt, Artificial Sequence
  Antisense oligonucleotide
ccgacgagcagcga

SEQ ID NO: 2831 - RNA, 14 nt, Artificial Sequence
  Antisense oligonucleotide
ugcaacgauccgua

SEQ ID NO: 2832 - RNA, 14 nt, Artificial Sequence
  Antisense oligonucleotide
uuggcuccugaacu

SEQ ID NO: 2833 - RNA, 14 nt, Artificial Sequence
  Antisense oligonucleotide
ccuguccacccauc

SEQ ID NO: 2834 - RNA, 14 nt, Artificial Sequence
  Antisense oligonucleotide
ccgacgagcagcga

SEQ ID NO: 2835 - RNA, 14 nt, Artificial Sequence
  Antisense oligonucleotide
ugcaacgauccgua

SEQ ID NO: 2836 - RNA, 14 nt, Artificial Sequence
  Antisense oligonucleotide
uuggcuccugaacu

SEQ ID NO: 2837 - RNA, 14 nt, Artificial Sequence
  Antisense oligonucleotide
ccuguccacccauc

SEQ ID NO: 2838 - RNA, 14 nt, Artificial Sequence
  Antisense oligonucleotide
ugcaacgauccgua

SEQ ID NO: 2839 - RNA, 14 nt, Artificial Sequence
  Antisense oligonucleotide
uuggcuccugaacu

SEQ ID NO: 2840 - RNA, 14 nt, Artificial Sequence
  Antisense oligonucleotide
ccuguccacccauc

SEQ ID NO: 2841 - RNA, 14 nt, Artificial Sequence
  Antisense oligonucleotide
ccgacgagcagcga

SEQ ID NO: 2842 - RNA, 14 nt, Artificial Sequence
  Antisense oligonucleotide
ugcaacgauccgua

SEQ ID NO: 2843 - RNA, 14 nt, Artificial Sequence
  Antisense oligonucleotide
ccgacgagcagcga

SEQ ID NO: 2844 - RNA, 14 nt, Artificial Sequence
  Antisense oligonucleotide
ugcaacgauccgua

SEQ ID NO: 2845 - RNA, 14 nt, Artificial Sequence
  Antisense oligonucleotide
uuggcuccugaacu

SEQ ID NO: 2846 - RNA, 14 nt, Artificial Sequence
  Antisense oligonucleotide
ccuguccacccauc

SEQ ID NO: 2847 - RNA, 14 nt, Artificial Sequence
  Antisense oligonucleotide
ccgacgagcagcga

SEQ ID NO: 2848 - RNA, 14 nt, Artificial Sequence
  Antisense oligonucleotide
ugcaacgauccgua

SEQ ID NO: 2849 - RNA, 14 nt, Artificial Sequence
  Antisense oligonucleotide
uuggcuccugaacu

SEQ ID NO: 2850 - RNA, 14 nt, Artificial Sequence
  Antisense oligonucleotide
ccuguccacccauc

SEQ ID NO: 2851 - RNA, 14 nt, Artificial Sequence
  Antisense oligonucleotide
ugcaacgauccgua

SEQ ID NO: 2852 - RNA, 14 nt, Artificial Sequence
  Antisense oligonucleotide
uuggcuccugaacu

SEQ ID NO: 2853 - RNA, 14 nt, Artificial Sequence
  Antisense oligonucleotide
ccuguccacccauc

SEQ ID NO: 2854 - RNA, 14 nt, Artificial Sequence
  Antisense oligonucleotide
ccgacgagcagcga

SEQ ID NO: 2855 - RNA, 14 nt, Artificial Sequence
  Antisense oligonucleotide
ugcaacgauccgua

SEQ ID NO: 2856 - RNA, 14 nt, Artificial Sequence
  Antisense oligonucleotide
uuggcuccugaacu

SEQ ID NO: 2857 - RNA, 14 nt, Artificial Sequence
  Antisense oligonucleotide
ccuguccacccauc

SEQ ID NO: 2858 - RNA, 14 nt, Artificial Sequence
  Antisense oligonucleotide
ccgacgagcagcga

SEQ ID NO: 2859 - RNA, 14 nt, Artificial Sequence
  Antisense oligonucleotide
ugcaacgauccgua

SEQ ID NO: 2860 - RNA, 14 nt, Artificial Sequence
  Antisense oligonucleotide
uuggcuccugaacu

SEQ ID NO: 2861 - RNA, 14 nt, Artificial Sequence
  Antisense oligonucleotide
ccuguccacccauc

SEQ ID NO: 2862 - RNA, 14 nt, Artificial Sequence
  Antisense oligonucleotide
ccgacgagcagcga

SEQ ID NO: 2863 - RNA, 14 nt, Artificial Sequence
  Antisense oligonucleotide
ugcaacgauccgua

SEQ ID NO: 2864 - RNA, 14 nt, Artificial Sequence
  Antisense oligonucleotide
uuggcuccugaacu

SEQ ID NO: 2865 - RNA, 14 nt, Artificial Sequence
  Antisense oligonucleotide
ccuguccacccauc

SEQ ID NO: 2866 - RNA, 14 nt, Artificial Sequence
  Antisense oligonucleotide
ugcaacgauccgua

SEQ ID NO: 2867 - RNA, 14 nt, Artificial Sequence
  Antisense oligonucleotide
uuggcuccugaacu

SEQ ID NO: 2868 - RNA, 14 nt, Artificial Sequence
  Antisense oligonucleotide
ccuguccacccauc

SEQ ID NO: 2869 - RNA, 14 nt, Artificial Sequence
  Antisense oligonucleotide
ccgacgagcagcga

SEQ ID NO: 2870 - RNA, 14 nt, Artificial Sequence
  Antisense oligonucleotide
ugcaacgauccgua

SEQ ID NO: 2871 - RNA, 14 nt, Artificial Sequence
  Antisense oligonucleotide
uuggcuccugaacu

SEQ ID NO: 2872 - RNA, 14 nt, Artificial Sequence
  Antisense oligonucleotide
ccuguccacccauc

SEQ ID NO: 2873 - RNA, 14 nt, Artificial Sequence
  Antisense oligonucleotide
ccccugugcucacu

SEQ ID NO: 2874 - RNA, 14 nt, Artificial Sequence
  Antisense oligonucleotide
ccgacgagcagcga

SEQ ID NO: 2875 - RNA, 14 nt, Artificial Sequence
  Antisense oligonucleotide
ugcaacgauccgua

SEQ ID NO: 2876 - RNA, 14 nt, Artificial Sequence
  Antisense oligonucleotide
uuggcuccugaacu

SEQ ID NO: 2877 - RNA, 14 nt, Artificial Sequence
  Antisense oligonucleotide
ccuguccacccauc

SEQ ID NO: 2878 - RNA, 14 nt, Artificial Sequence
  Antisense oligonucleotide
ccgacgagcagcga

SEQ ID NO: 2879 - RNA, 14 nt, Artificial Sequence
  Antisense oligonucleotide
ugcaacgauccgua

SEQ ID NO: 2880 - RNA, 14 nt, Artificial Sequence
  Antisense oligonucleotide
uuggcuccugaacu

SEQ ID NO: 2881 - RNA, 14 nt, Artificial Sequence
  Antisense oligonucleotide
ccuguccacccauc

SEQ ID NO: 2882 - RNA, 14 nt, Artificial Sequence
  Antisense oligonucleotide
ugcaacgauccgua

SEQ ID NO: 2883 - RNA, 14 nt, Artificial Sequence
  Antisense oligonucleotide
uuggcuccugaacu

SEQ ID NO: 2884 - RNA, 14 nt, Artificial Sequence
  Antisense oligonucleotide
ccuguccacccauc

SEQ ID NO: 2885 - RNA, 14 nt, Artificial Sequence
  Antisense oligonucleotide
ccgacgagcagcga

SEQ ID NO: 2886 - RNA, 14 nt, Artificial Sequence
  Antisense oligonucleotide
ugcaacgauccgua

SEQ ID NO: 2887 - RNA, 14 nt, Artificial Sequence
  Antisense oligonucleotide
uuggcuccugaacu

SEQ ID NO: 2888 - RNA, 14 nt, Artificial Sequence
  Antisense oligonucleotide
ccuguccacccauc

SEQ ID NO: 2889 - RNA, 14 nt, Artificial Sequence
  Antisense oligonucleotide
ccgacgagcagcga

SEQ ID NO: 2890 - RNA, 14 nt, Artificial Sequence
  Antisense oligonucleotide
ugcaacgauccgua

SEQ ID NO: 2891 - RNA, 14 nt, Artificial Sequence
  Antisense oligonucleotide
uuggcuccugaacu

SEQ ID NO: 2892 - RNA, 14 nt, Artificial Sequence
  Antisense oligonucleotide
ccuguccacccauc

SEQ ID NO: 2893 - RNA, 14 nt, Artificial Sequence
  Antisense oligonucleotide
ccgacgagcagcga

SEQ ID NO: 2894 - RNA, 14 nt, Artificial Sequence
  Antisense oligonucleotide
ugcaacgauccgua

SEQ ID NO: 2895 - RNA, 14 nt, Artificial Sequence
  Antisense oligonucleotide
uuggcuccugaacu

SEQ ID NO: 2896 - RNA, 14 nt, Artificial Sequence
  Antisense oligonucleotide
ccuguccacccauc

SEQ ID NO: 2897 - RNA, 14 nt, Artificial Sequence
  Antisense oligonucleotide
ugcaacgauccgua

SEQ ID NO: 2898 - RNA, 14 nt, Artificial Sequence
  Antisense oligonucleotide
uuggcuccugaacu

SEQ ID NO: 2899 - RNA, 14 nt, Artificial Sequence
  Antisense oligonucleotide
ccuguccacccauc

SEQ ID NO: 2900 - RNA, 14 nt, Artificial Sequence
  Antisense oligonucleotide
ccgacgagcagcga

SEQ ID NO: 2901 - RNA, 14 nt, Artificial Sequence
  Antisense oligonucleotide
ugcaacgauccgua

SEQ ID NO: 2902 - RNA, 14 nt, Artificial Sequence
  Antisense oligonucleotide
ccgacgagcagcga

SEQ ID NO: 2903 - RNA, 14 nt, Artificial Sequence
  Antisense oligonucleotide
ugcaacgauccgua

SEQ ID NO: 2904 - RNA, 14 nt, Artificial Sequence
  Antisense oligonucleotide
uuggcuccugaacu

SEQ ID NO: 2905 - RNA, 14 nt, Artificial Sequence
  Antisense oligonucleotide
ccuguccacccauc

SEQ ID NO: 2906 - RNA, 14 nt, Artificial Sequence
  Antisense oligonucleotide
ccgacgagcagcga

SEQ ID NO: 2907 - RNA, 14 nt, Artificial Sequence
  Antisense oligonucleotide
ugcaacgauccgua

SEQ ID NO: 2908 - RNA, 14 nt, Artificial Sequence
  Antisense oligonucleotide
uuggcuccugaacu

SEQ ID NO: 2909 - RNA, 14 nt, Artificial Sequence
  Antisense oligonucleotide
ccuguccacccauc

SEQ ID NO: 2910 - RNA, 14 nt, Artificial Sequence
  Antisense oligonucleotide
ugcaacgauccgua

SEQ ID NO: 2911 - RNA, 14 nt, Artificial Sequence
  Antisense oligonucleotide
uuggcuccugaacu

SEQ ID NO: 2912 - RNA, 14 nt, Artificial Sequence
  Antisense oligonucleotide
ccuguccacccauc

SEQ ID NO: 2913 - RNA, 14 nt, Artificial Sequence
  Antisense oligonucleotide
ccgacgagcagcga

SEQ ID NO: 2914 - RNA, 14 nt, Artificial Sequence
  Antisense oligonucleotide
ugcaacgauccgua

SEQ ID NO: 2915 - RNA, 14 nt, Artificial Sequence
  Antisense oligonucleotide
uuggcuccugaacu

SEQ ID NO: 2916 - RNA, 14 nt, Artificial Sequence
  Antisense oligonucleotide
ccuguccacccauc

SEQ ID NO: 2917 - RNA, 14 nt, Artificial Sequence
  Antisense oligonucleotide
ccgacgagcagcga

SEQ ID NO: 2918 - RNA, 14 nt, Artificial Sequence
  Antisense oligonucleotide
ugcaacgauccgua

SEQ ID NO: 2919 - RNA, 14 nt, Artificial Sequence
  Antisense oligonucleotide
uuggcuccugaacu

SEQ ID NO: 2920 - RNA, 14 nt, Artificial Sequence
  Antisense oligonucleotide
ccuguccacccauc

SEQ ID NO: 2921 - RNA, 14 nt, Artificial Sequence
  Antisense oligonucleotide
ccgacgagcagcga

SEQ ID NO: 2922 - RNA, 14 nt, Artificial Sequence
  Antisense oligonucleotide
ugcaacgauccgua

SEQ ID NO: 2923 - RNA, 14 nt, Artificial Sequence
  Antisense oligonucleotide
uuggcuccugaacu

SEQ ID NO: 2924 - RNA, 14 nt, Artificial Sequence
  Antisense oligonucleotide
ccuguccacccauc

SEQ ID NO: 2925 - RNA, 14 nt, Artificial Sequence
  Antisense oligonucleotide
ugcaacgauccgua

SEQ ID NO: 2926 - RNA, 14 nt, Artificial Sequence
  Antisense oligonucleotide
uuggcuccugaacu

SEQ ID NO: 2927 - RNA, 14 nt, Artificial Sequence
  Antisense oligonucleotide
ccuguccacccauc

SEQ ID NO: 2928 - RNA, 14 nt, Artificial Sequence
  Antisense oligonucleotide
ccgacgagcagcga

SEQ ID NO: 2929 - RNA, 14 nt, Artificial Sequence
  Antisense oligonucleotide
ugcaacgauccgua

SEQ ID NO: 2930 - RNA, 14 nt, Artificial Sequence
  Antisense oligonucleotide
ugcaacgauccgua

SEQ ID NO: 2931 - RNA, 14 nt, Artificial Sequence
  Antisense oligonucleotide
ccgacgagcagcga

SEQ ID NO: 2932 - RNA, 14 nt, Artificial Sequence
  Antisense oligonucleotide
ugcaacgauccgua

SEQ ID NO: 2933 - RNA, 14 nt, Artificial Sequence
  Antisense oligonucleotide
uuggcuccugaacu

SEQ ID NO: 2934 - RNA, 14 nt, Artificial Sequence
  Antisense oligonucleotide
ccuguccacccauc

SEQ ID NO: 2935 - RNA, 14 nt, Artificial Sequence
  Antisense oligonucleotide
ccgacgagcagcga

SEQ ID NO: 2936 - RNA, 14 nt, Artificial Sequence
  Antisense oligonucleotide
ugcaacgauccgua

SEQ ID NO: 2937 - RNA, 14 nt, Artificial Sequence
  Antisense oligonucleotide
uuggcuccugaacu

SEQ ID NO: 2938 - RNA, 14 nt, Artificial Sequence
  Antisense oligonucleotide
ccuguccacccauc

SEQ ID NO: 2939 - RNA, 14 nt, Artificial Sequence
  Antisense oligonucleotide
ugcaacgauccgua

SEQ ID NO: 2940 - RNA, 14 nt, Artificial Sequence
  Antisense oligonucleotide
uuggcuccugaacu

SEQ ID NO: 2941 - RNA, 14 nt, Artificial Sequence
  Antisense oligonucleotide
ccuguccacccauc

SEQ ID NO: 2942 - RNA, 14 nt, Artificial Sequence
  Antisense oligonucleotide
ugcaacgauccgua

SEQ ID NO: 2943 - RNA, 14 nt, Artificial Sequence
  Antisense oligonucleotide
ccgacgagcagcga

SEQ ID NO: 2944 - RNA, 14 nt, Artificial Sequence
  Antisense oligonucleotide
ugcaacgauccgua

SEQ ID NO: 2945 - RNA, 14 nt, Artificial Sequence
  Antisense oligonucleotide
uuggcuccugaacu

SEQ ID NO: 2946 - RNA, 14 nt, Artificial Sequence
  Antisense oligonucleotide
ccuguccacccauc

SEQ ID NO: 2947 - RNA, 14 nt, Artificial Sequence
  Antisense oligonucleotide
ccgacgagcagcga

SEQ ID NO: 2948 - RNA, 14 nt, Artificial Sequence
  Antisense oligonucleotide
ugcaacgauccgua

SEQ ID NO: 2949 - RNA, 14 nt, Artificial Sequence
  Antisense oligonucleotide
uuggcuccugaacu

SEQ ID NO: 2950 - RNA, 14 nt, Artificial Sequence
  Antisense oligonucleotide
ccuguccacccauc

SEQ ID NO: 2951 - RNA, 14 nt, Artificial Sequence
  Antisense oligonucleotide
ugcaacgauccgua

SEQ ID NO: 2952 - RNA, 14 nt, Artificial Sequence
  Antisense oligonucleotide
uuggcuccugaacu

SEQ ID NO: 2953 - RNA, 14 nt, Artificial Sequence
  Antisense oligonucleotide
ccuguccacccauc

SEQ ID NO: 2954 - RNA, 14 nt, Artificial Sequence
  Antisense oligonucleotide
ccgacgagcagcga

SEQ ID NO: 2955 - RNA, 14 nt, Artificial Sequence
  Antisense oligonucleotide
ugcaacgauccgua

SEQ ID NO: 2956 - RNA, 14 nt, Artificial Sequence
  Antisense oligonucleotide
uuggcuccugaacu

SEQ ID NO: 2957 - RNA, 14 nt, Artificial Sequence
  Antisense oligonucleotide
ccuguccacccauc

SEQ ID NO: 2958 - RNA, 14 nt, Artificial Sequence
  Antisense oligonucleotide
ccgacgagcagcga

SEQ ID NO: 2959 - RNA, 14 nt, Artificial Sequence
  Antisense oligonucleotide
ugcaacgauccgua

SEQ ID NO: 2960 - RNA, 14 nt, Artificial Sequence
  Antisense oligonucleotide
ccgacgagcagcga

SEQ ID NO: 2961 - RNA, 14 nt, Artificial Sequence
  Antisense oligonucleotide
ugcaacgauccgua

SEQ ID NO: 2962 - RNA, 14 nt, Artificial Sequence
  Antisense oligonucleotide
uuggcuccugaacu

SEQ ID NO: 2963 - RNA, 14 nt, Artificial Sequence
  Antisense oligonucleotide
ccuguccacccauc

SEQ ID NO: 2964 - RNA, 14 nt, Artificial Sequence
  Antisense oligonucleotide
ccgacgagcagcga

SEQ ID NO: 2965 - RNA, 14 nt, Artificial Sequence
  Antisense oligonucleotide
ugcaacgauccgua

SEQ ID NO: 2966 - RNA, 14 nt, Artificial Sequence
  Antisense oligonucleotide
uuggcuccugaacu

SEQ ID NO: 2967 - RNA, 14 nt, Artificial Sequence
  Antisense oligonucleotide
ccuguccacccauc

SEQ ID NO: 2968 - RNA, 14 nt, Artificial Sequence
  Antisense oligonucleotide
ugcaacgauccgua

SEQ ID NO: 2969 - RNA, 14 nt, Artificial Sequence
  Antisense oligonucleotide
uuggcuccugaacu

SEQ ID NO: 2970 - RNA, 14 nt, Artificial Sequence
  Antisense oligonucleotide
ccuguccacccauc

SEQ ID NO: 2971 - RNA, 14 nt, Artificial Sequence
  Antisense oligonucleotide
ccgacgagcagcga

SEQ ID NO: 2972 - RNA, 14 nt, Artificial Sequence
  Antisense oligonucleotide
ugcaacgauccgua

SEQ ID NO: 2973 - RNA, 14 nt, Artificial Sequence
  Antisense oligonucleotide
ugcaacgauccgua

SEQ ID NO: 2974 - RNA, 14 nt, Artificial Sequence
  Antisense oligonucleotide
ccgacgagcagcga

SEQ ID NO: 2975 - RNA, 14 nt, Artificial Sequence
  Antisense oligonucleotide
ugcaacgauccgua

SEQ ID NO: 2976 - RNA, 14 nt, Artificial Sequence
  Antisense oligonucleotide
uuggcuccugaacu

SEQ ID NO: 2977 - RNA, 14 nt, Artificial Sequence
  Antisense oligonucleotide
ccuguccacccauc

SEQ ID NO: 2978 - RNA, 14 nt, Artificial Sequence
  Antisense oligonucleotide
ccgacgagcagcga

SEQ ID NO: 2979 - RNA, 14 nt, Artificial Sequence
  Antisense oligonucleotide
ugcaacgauccgua

SEQ ID NO: 2980 - RNA, 14 nt, Artificial Sequence
  Antisense oligonucleotide
uuggcuccugaacu

SEQ ID NO: 2981 - RNA, 14 nt, Artificial Sequence
  Antisense oligonucleotide
ccuguccacccauc

SEQ ID NO: 2982 - RNA, 14 nt, Artificial Sequence
  Antisense oligonucleotide
ugcaacgauccgua

SEQ ID NO: 2983 - RNA, 14 nt, Artificial Sequence
  Antisense oligonucleotide
uuggcuccugaacu

SEQ ID NO: 2984 - RNA, 14 nt, Artificial Sequence
  Antisense oligonucleotide
ccuguccacccauc

SEQ ID NO: 2985 - RNA, 14 nt, Artificial Sequence
  Antisense oligonucleotide
ccgacgagcagcga

SEQ ID NO: 2986 - RNA, 14 nt, Artificial Sequence
  Antisense oligonucleotide
ugcaacgauccgua

SEQ ID NO: 2987 - RNA, 14 nt, Artificial Sequence
  Antisense oligonucleotide
uuggcuccugaacu

SEQ ID NO: 2988 - RNA, 14 nt, Artificial Sequence
  Antisense oligonucleotide
ccuguccacccauc

SEQ ID NO: 2989 - RNA, 14 nt, Artificial Sequence
  Antisense oligonucleotide
ccgacgagcagcga

SEQ ID NO: 2990 - RNA, 14 nt, Artificial Sequence
  Antisense oligonucleotide
ugcaacgauccgua

SEQ ID NO: 2991 - RNA, 14 nt, Artificial Sequence
  Antisense oligonucleotide
uuggcuccugaacu

SEQ ID NO: 2992 - RNA, 14 nt, Artificial Sequence
  Antisense oligonucleotide
ucuggaaguucuac

SEQ ID NO: 2993 - RNA, 14 nt, Artificial Sequence
  Antisense oligonucleotide
ugucacuacugcua

SEQ ID NO: 2994 - RNA, 14 nt, Artificial Sequence
  Antisense oligonucleotide
ccgagcacgacggc

SEQ ID NO: 2995 - RNA, 14 nt, Artificial Sequence
  Antisense oligonucleotide
ccgacgagcagcga

SEQ ID NO: 2996 - RNA, 14 nt, Artificial Sequence
  Antisense oligonucleotide
ccuguccacccauc

SEQ ID NO: 2997 - RNA, 14 nt, Artificial Sequence
  Antisense oligonucleotide
ccgacgagcagcga

SEQ ID NO: 2998 - RNA, 14 nt, Artificial Sequence
  Antisense oligonucleotide
ugcaacgauccgua

SEQ ID NO: 2999 - RNA, 14 nt, Artificial Sequence
  Antisense oligonucleotide
ugcaacgauccgua

SEQ ID NO: 3000 - RNA, 20 nt, Artificial Sequence
  Antisense oligonucleotide
  misc_feature (1)..(1): BNA scaffold modification
  misc_feature (6)..(6): BNA scaffold modification
  misc_feature (11)..(11): BNA scaffold modification
  misc_feature (20)..(20): BNA scaffold modification
cauuucucaacagaucuguc

SEQ ID NO: 3001 - RNA, 20 nt, Artificial Sequence
  Antisense oligonucleotide
  misc_feature (1)..(1): BNA scaffold modification
  misc_feature (11)..(11): BNA scaffold modification
  misc_feature (16)..(16): BNA scaffold modification
  misc_feature (20)..(20): BNA scaffold modification
cauuucucaacagaucuguc

SEQ ID NO: 3002 - RNA, 20 nt, Artificial Sequence
  Antisense oligonucleotide
  misc_feature (1)..(1): BNA scaffold modification
  misc_feature (13)..(13): BNA scaffold modification
  misc_feature (18)..(18): BNA scaffold modification
  misc_feature (20)..(20): BNA scaffold modification
cauuucucaacagaucuguc

SEQ ID NO: 3003 - RNA, 20 nt, Artificial Sequence
  Antisense oligonucleotide
  misc_feature (1)..(2): BNA scaffold modification
  misc_feature (19)..(20): BNA scaffold modification
cauuucucaacagaucugtc

SEQ ID NO: 3004 - RNA, 20 nt, Artificial Sequence
  Antisense oligonucleotide
  misc_feature (1)..(2): BNA scaffold modification
  misc_feature (8)..(8): BNA scaffold modification
  misc_feature (11)..(11): BNA scaffold modification
  misc_feature (19)..(20): BNA scaffold modification
cauuucucaacagaucugtc

SEQ ID NO: 3005 - RNA, 20 nt, Artificial Sequence
  Antisense oligonucleotide
  misc_feature (1)..(1): BNA scaffold modification
  misc_feature (20)..(20): BNA scaffold modification
auuucucaacagaucuguca

SEQ ID NO: 3006 - RNA, 20 nt, Artificial Sequence
  Antisense oligonucleotide
  misc_feature (1)..(1): BNA scaffold modification
  misc_feature (5)..(5): BNA scaffold modification
  misc_feature (20)..(20): BNA scaffold modification
auuucucaacagaucuguca

SEQ ID NO: 3007 - RNA, 20 nt, Artificial Sequence
  Antisense oligonucleotide
  misc_feature (1)..(1): BNA scaffold modification
  misc_feature (7)..(7): BNA scaffold modification
  misc_feature (20)..(20): BNA scaffold modification
auuucucaacagaucuguca

SEQ ID NO: 3008 - RNA, 20 nt, Artificial Sequence
  Antisense oligonucleotide
  misc_feature (1)..(1): BNA scaffold modification
  misc_feature (10)..(10): BNA scaffold modification
  misc_feature (20)..(20): BNA scaffold modification
auuucucaacagaucuguca

SEQ ID NO: 3009 - RNA, 20 nt, Artificial Sequence
  Antisense oligonucleotide
  misc_feature (1)..(1): BNA scaffold modification
  misc_feature (12)..(12): BNA scaffold modification
  misc_feature (20)..(20): BNA scaffold modification
auuucucaacagaucuguca

SEQ ID NO: 3010 - RNA, 20 nt, Artificial Sequence
  Antisense oligonucleotide
  misc_feature (1)..(1): BNA scaffold modification
  misc_feature (15)..(15): BNA scaffold modification
  misc_feature (20)..(20): BNA scaffold modification
auuucucaacagaucuguca

SEQ ID NO: 3011 - RNA, 20 nt, Artificial Sequence
  Antisense oligonucleotide
  misc_feature (1)..(1): BNA scaffold modification
  misc_feature (17)..(17): BNA scaffold modification
  misc_feature (20)..(20): BNA scaffold modification
auuucucaacagaucuguca

SEQ ID NO: 3012 - RNA, 20 nt, Artificial Sequence
  Antisense oligonucleotide
  misc_feature (1)..(2): BNA scaffold modification
  misc_feature (19)..(20): BNA scaffold modification
atuucucaacagaucuguca

SEQ ID NO: 3013 - RNA, 20 nt, Artificial Sequence
  Antisense oligonucleotide
  misc_feature (1)..(1): BNA scaffold modification
  misc_feature (5)..(5): BNA scaffold modification
  misc_feature (10)..(10): BNA scaffold modification
  misc_feature (20)..(20): BNA scaffold modification
auuucucaacagaucuguca

SEQ ID NO: 3014 - RNA, 20 nt, Artificial Sequence
  Antisense oligonucleotide
  misc_feature (1)..(1): BNA scaffold modification
  misc_feature (10)..(10): BNA scaffold modification
  misc_feature (15)..(15): BNA scaffold modification
  misc_feature (20)..(20): BNA scaffold modification
auuucucaacagaucuguca

SEQ ID NO: 3015 - RNA, 20 nt, Artificial Sequence
  Antisense oligonucleotide
  misc_feature (1)..(1): BNA scaffold modification
  misc_feature (12)..(12): BNA scaffold modification
  misc_feature (17)..(17): BNA scaffold modification
  misc_feature (20)..(20): BNA scaffold modification
auuucucaacagaucuguca

SEQ ID NO: 3016 - RNA, 20 nt, Artificial Sequence
  Antisense oligonucleotide
  misc_feature (1)..(1): BNA scaffold modification
  misc_feature (5)..(5): BNA scaffold modification
  misc_feature (10)..(10): BNA scaffold modification
  misc_feature (15)..(15): BNA scaffold modification
  misc_feature (20)..(20): BNA scaffold modification
auuucucaacagaucuguca

SEQ ID NO: 3017 - RNA, 20 nt, Artificial Sequence
  Antisense oligonucleotide
  misc_feature (1)..(1): BNA scaffold modification
  misc_feature (5)..(5): BNA scaffold modification
  misc_feature (7)..(7): BNA scaffold modification
  misc_feature (12)..(12): BNA scaffold modification
  misc_feature (17)..(17): BNA scaffold modification
  misc_feature (20)..(20): BNA scaffold modification
auuucucaacagaucuguca

SEQ ID NO: 3018 - RNA, 18 nt, Artificial Sequence
  Antisense oligonucleotide
  misc_feature (1)..(1): BNA scaffold modification
  misc_feature (18)..(18): BNA scaffold modification
gccauuucucaacagauc

SEQ ID NO: 3019 - RNA, 18 nt, Artificial Sequence
  Antisense oligonucleotide
  misc_feature (1)..(1): BNA scaffold modification
  misc_feature (3)..(3): BNA scaffold modification
  misc_feature (18)..(18): BNA scaffold modification
gccauuucucaacagauc

SEQ ID NO: 3020 - RNA, 18 nt, Artificial Sequence
  Antisense oligonucleotide
  misc_feature (1)..(1): BNA scaffold modification
  misc_feature (8)..(8): BNA scaffold modification
  misc_feature (18)..(18): BNA scaffold modification
gccauuucucaacagauc

SEQ ID NO: 3021 - RNA, 18 nt, Artificial Sequence
  Antisense oligonucleotide
  misc_feature (1)..(1): BNA scaffold modification
  misc_feature (10)..(10): BNA scaffold modification
  misc_feature (18)..(18): BNA scaffold modification
gccauuucucaacagauc

SEQ ID NO: 3022 - RNA, 18 nt, Artificial Sequence
  Antisense oligonucleotide
  misc_feature (1)..(1): BNA scaffold modification
  misc_feature (13)..(13): BNA scaffold modification
  misc_feature (18)..(18): BNA scaffold modification
gccauuucucaacagauc

SEQ ID NO: 3023 - RNA, 18 nt, Artificial Sequence
  Antisense oligonucleotide
  misc_feature (1)..(1): BNA scaffold modification
  misc_feature (15)..(15): BNA scaffold modification
  misc_feature (18)..(18): BNA scaffold modification
gccauuucucaacagauc

SEQ ID NO: 3024 - RNA, 18 nt, Artificial Sequence
  Antisense oligonucleotide
  misc_feature (1)..(1): BNA scaffold modification
  misc_feature (3)..(3): BNA scaffold modification
  misc_feature (15)..(15): BNA scaffold modification
  misc_feature (18)..(18): BNA scaffold modification
gccauuucucaacagauc

SEQ ID NO: 3025 - RNA, 18 nt, Artificial Sequence
  Antisense oligonucleotide
  misc_feature (1)..(1): BNA scaffold modification
  misc_feature (8)..(8): BNA scaffold modification
  misc_feature (13)..(13): BNA scaffold modification
  misc_feature (18)..(18): BNA scaffold modification
gccauuucucaacagauc

SEQ ID NO: 3026 - RNA, 18 nt, Artificial Sequence
  Antisense oligonucleotide
  misc_feature (1)..(1): BNA scaffold modification
  misc_feature (8)..(8): BNA scaffold modification
  misc_feature (15)..(15): BNA scaffold modification
  misc_feature (18)..(18): BNA scaffold modification
gccauuucucaacagauc

SEQ ID NO: 3027 - RNA, 18 nt, Artificial Sequence
  Antisense oligonucleotide
  misc_feature (1)..(2): BNA scaffold modification
  misc_feature (17)..(18): BNA scaffold modification
gccauuucucaacagatc

SEQ ID NO: 3028 - RNA, 18 nt, Artificial Sequence
  Antisense oligonucleotide
  misc_feature (1)..(1): BNA scaffold modification
  misc_feature (3)..(3): BNA scaffold modification
  misc_feature (8)..(8): BNA scaffold modification
  misc_feature (13)..(13): BNA scaffold modification
  misc_feature (18)..(18): BNA scaffold modification
gccauuucucaacagauc

SEQ ID NO: 3029 - RNA, 18 nt, Artificial Sequence
  Antisense oligonucleotide
  misc_feature (1)..(2): BNA scaffold modification
  misc_feature (10)..(10): BNA scaffold modification
  misc_feature (17)..(18): BNA scaffold modification
gccauuucucaacagatc

SEQ ID NO: 3030 - RNA, 18 nt, Artificial Sequence
  Antisense oligonucleotide
  misc_feature (1)..(1): BNA scaffold modification
  misc_feature (18)..(18): BNA scaffold modification
ccauuucucaacagauct

SEQ ID NO: 3031 - RNA, 18 nt, Artificial Sequence
  Antisense oligonucleotide
  misc_feature (1)..(1): BNA scaffold modification
  misc_feature (7)..(7): BNA scaffold modification
  misc_feature (18)..(18): BNA scaffold modification
ccauuucucaacagauct

SEQ ID NO: 3032 - RNA, 18 nt, Artificial Sequence
  Antisense oligonucleotide
  misc_feature (1)..(1): BNA scaffold modification
  misc_feature (9)..(9): BNA scaffold modification
  misc_feature (18)..(18): BNA scaffold modification
ccauuucucaacagauct

SEQ ID NO: 3033 - RNA, 18 nt, Artificial Sequence
  Antisense oligonucleotide
  misc_feature (1)..(1): BNA scaffold modification
  misc_feature (12)..(12): BNA scaffold modification
  misc_feature (18)..(18): BNA scaffold modification
ccauuucucaacagauct

SEQ ID NO: 3034 - RNA, 18 nt, Artificial Sequence
  Antisense oligonucleotide
  misc_feature (1)..(1): BNA scaffold modification
  misc_feature (14)..(14): BNA scaffold modification
  misc_feature (18)..(18): BNA scaffold modification
ccauuucucaacagauct

SEQ ID NO: 3035 - RNA, 18 nt, Artificial Sequence
  Antisense oligonucleotide
  misc_feature (1)..(1): BNA scaffold modification
  misc_feature (7)..(7): BNA scaffold modification
  misc_feature (14)..(14): BNA scaffold modification
  misc_feature (18)..(18): BNA scaffold modification
ccauuucucaacagauct

SEQ ID NO: 3036 - RNA, 18 nt, Artificial Sequence
  Antisense oligonucleotide
  misc_feature (1)..(1): BNA scaffold modification
  misc_feature (7)..(7): BNA scaffold modification
  misc_feature (9)..(9): BNA scaffold modification
  misc_feature (18)..(18): BNA scaffold modification
ccauuucucaacagauct

SEQ ID NO: 3037 - RNA, 18 nt, Artificial Sequence
  Antisense oligonucleotide
  misc_feature (1)..(1): BNA scaffold modification
  misc_feature (9)..(9): BNA scaffold modification
  misc_feature (14)..(14): BNA scaffold modification
  misc_feature (18)..(18): BNA scaffold modification
ccauuucucaacagauct

SEQ ID NO: 3038 - RNA, 18 nt, Artificial Sequence
  Antisense oligonucleotide
  misc_feature (1)..(2): BNA scaffold modification
  misc_feature (17)..(18): BNA scaffold modification
ccauuucucaacagauct

SEQ ID NO: 3039 - RNA, 18 nt, Artificial Sequence
  Antisense oligonucleotide
  misc_feature (1)..(1): BNA scaffold modification
  misc_feature (14)..(14): BNA scaffold modification
  misc_feature (17)..(18): BNA scaffold modification
ccauuucucaacagauct

SEQ ID NO: 3040 - RNA, 18 nt, Artificial Sequence
  Antisense oligonucleotide
  misc_feature (1)..(1): BNA scaffold modification
  misc_feature (9)..(9): BNA scaffold modification
  misc_feature (14)..(14): BNA scaffold modification
  misc_feature (17)..(18): BNA scaffold modification
ccauuucucaacagauct

SEQ ID NO: 3041 - RNA, 18 nt, Artificial Sequence
  Antisense oligonucleotide
  misc_feature (1)..(1): BNA scaffold modification
  misc_feature (18)..(18): BNA scaffold modification
cauuucucaacagaucug

SEQ ID NO: 3042 - RNA, 18 nt, Artificial Sequence
  Antisense oligonucleotide
  misc_feature (1)..(1): BNA scaffold modification
  misc_feature (6)..(6): BNA scaffold modification
  misc_feature (18)..(18): BNA scaffold modification
cauuucucaacagaucug

SEQ ID NO: 3043 - RNA, 18 nt, Artificial Sequence
  Antisense oligonucleotide
  misc_feature (1)..(1): BNA scaffold modification
  misc_feature (8)..(8): BNA scaffold modification
  misc_feature (18)..(18): BNA scaffold modification
cauuucucaacagaucug

SEQ ID NO: 3044 - RNA, 18 nt, Artificial Sequence
  Antisense oligonucleotide
  misc_feature (1)..(1): BNA scaffold modification
  misc_feature (11)..(11): BNA scaffold modification
  misc_feature (18)..(18): BNA scaffold modification
cauuucucaacagaucug

SEQ ID NO: 3045 - RNA, 18 nt, Artificial Sequence
  Antisense oligonucleotide
  misc_feature (1)..(1): BNA scaffold modification
  misc_feature (13)..(13): BNA scaffold modification
  misc_feature (18)..(18): BNA scaffold modification
cauuucucaacagaucug

SEQ ID NO: 3046 - RNA, 18 nt, Artificial Sequence
  Antisense oligonucleotide
  misc_feature (1)..(1): BNA scaffold modification
  misc_feature (16)..(16): BNA scaffold modification
  misc_feature (18)..(18): BNA scaffold modification
cauuucucaacagaucug

SEQ ID NO: 3047 - RNA, 18 nt, Artificial Sequence
  Antisense oligonucleotide
  misc_feature (1)..(1): BNA scaffold modification
  misc_feature (6)..(6): BNA scaffold modification
  misc_feature (16)..(16): BNA scaffold modification
  misc_feature (18)..(18): BNA scaffold modification
cauuucucaacagaucug

SEQ ID NO: 3048 - RNA, 18 nt, Artificial Sequence
  Antisense oligonucleotide
  misc_feature (1)..(1): BNA scaffold modification
  misc_feature (8)..(8): BNA scaffold modification
  misc_feature (13)..(13): BNA scaffold modification
  misc_feature (18)..(18): BNA scaffold modification
cauuucucaacagaucug

SEQ ID NO: 3049 - RNA, 18 nt, Artificial Sequence
  Antisense oligonucleotide
  misc_feature (1)..(1): BNA scaffold modification
  misc_feature (6)..(6): BNA scaffold modification
  misc_feature (11)..(11): BNA scaffold modification
  misc_feature (16)..(16): BNA scaffold modification
  misc_feature (18)..(18): BNA scaffold modification
cauuucucaacagaucug

SEQ ID NO: 3050 - RNA, 18 nt, Artificial Sequence
  Antisense oligonucleotide
  misc_feature (1)..(1): BNA scaffold modification
  misc_feature (6)..(6): BNA scaffold modification
  misc_feature (13)..(13): BNA scaffold modification
  misc_feature (18)..(18): BNA scaffold modification
cauuucucaacagaucug

SEQ ID NO: 3051 - RNA, 18 nt, Artificial Sequence
  Antisense oligonucleotide
  misc_feature (1)..(2): BNA scaffold modification
  misc_feature (17)..(18): BNA scaffold modification
cauuucucaacagauctg

SEQ ID NO: 3052 - RNA, 18 nt, Artificial Sequence
  Antisense oligonucleotide
  misc_feature (1)..(2): BNA scaffold modification
  misc_feature (8)..(8): BNA scaffold modification
  misc_feature (17)..(18): BNA scaffold modification
cauuucucaacagauctg

SEQ ID NO: 3053 - RNA, 18 nt, Artificial Sequence
  Antisense oligonucleotide
  misc_feature (1)..(1): BNA scaffold modification
  misc_feature (18)..(18): BNA scaffold modification
auuucucaacagaucugt

SEQ ID NO: 3054 - RNA, 18 nt, Artificial Sequence
  Antisense oligonucleotide
  misc_feature (1)..(1): BNA scaffold modification
  misc_feature (5)..(5): BNA scaffold modification
  misc_feature (18)..(18): BNA scaffold modification
auuucucaacagaucugt

SEQ ID NO: 3055 - RNA, 18 nt, Artificial Sequence
  Antisense oligonucleotide
  misc_feature (1)..(1): BNA scaffold modification
  misc_feature (7)..(7): BNA scaffold modification
  misc_feature (18)..(18): BNA scaffold modification
auuucucaacagaucugt

SEQ ID NO: 3056 - RNA, 18 nt, Artificial Sequence
  Antisense oligonucleotide
  misc_feature (1)..(1): BNA scaffold modification
  misc_feature (10)..(10): BNA scaffold modification
  misc_feature (18)..(18): BNA scaffold modification
auuucucaacagaucugt

SEQ ID NO: 3057 - RNA, 18 nt, Artificial Sequence
  Antisense oligonucleotide
  misc_feature (1)..(1): BNA scaffold modification
  misc_feature (12)..(12): BNA scaffold modification
  misc_feature (18)..(18): BNA scaffold modification
auuucucaacagaucugt

SEQ ID NO: 3058 - RNA, 18 nt, Artificial Sequence
  Antisense oligonucleotide
  misc_feature (1)..(1): BNA scaffold modification
  misc_feature (15)..(15): BNA scaffold modification
  misc_feature (18)..(18): BNA scaffold modification
auuucucaacagaucugt

SEQ ID NO: 3059 - RNA, 18 nt, Artificial Sequence
  Antisense oligonucleotide
  misc_feature (1)..(1): BNA scaffold modification
  misc_feature (17)..(18): BNA scaffold modification
auuucucaacagaucugt

SEQ ID NO: 3060 - RNA, 18 nt, Artificial Sequence
  Antisense oligonucleotide
  misc_feature (1)..(1): BNA scaffold modification
  misc_feature (5)..(5): BNA scaffold modification
  misc_feature (12)..(12): BNA scaffold modification
  misc_feature (18)..(18): BNA scaffold modification
auuucucaacagaucugt

SEQ ID NO: 3061 - RNA, 18 nt, Artificial Sequence
  Antisense oligonucleotide
  misc_feature (1)..(1): BNA scaffold modification
  misc_feature (5)..(5): BNA scaffold modification
  misc_feature (10)..(10): BNA scaffold modification
  misc_feature (15)..(15): BNA scaffold modification
  misc_feature (18)..(18): BNA scaffold modification
auuucucaacagaucugt

SEQ ID NO: 3062 - RNA, 18 nt, Artificial Sequence
  Antisense oligonucleotide
  misc_feature (1)..(1): BNA scaffold modification
  misc_feature (5)..(5): BNA scaffold modification
  misc_feature (7)..(7): BNA scaffold modification
  misc_feature (10)..(10): BNA scaffold modification
  misc_feature (18)..(18): BNA scaffold modification
auuucucaacagaucugt

SEQ ID NO: 3063 - RNA, 18 nt, Artificial Sequence
  Antisense oligonucleotide
  misc_feature (1)..(2): BNA scaffold modification
  misc_feature (17)..(18): BNA scaffold modification
atuucucaacagaucugt

SEQ ID NO: 3064 - RNA, 18 nt, Artificial Sequence
  Antisense oligonucleotide
  misc_feature (1)..(2): BNA scaffold modification
  misc_feature (12)..(12): BNA scaffold modification
  misc_feature (17)..(18): BNA scaffold modification
atuucucaacagaucugt

SEQ ID NO: 3065 - RNA, 18 nt, Artificial Sequence
  Antisense oligonucleotide
  misc_feature (1)..(1): BNA scaffold modification
  misc_feature (18)..(18): BNA scaffold modification
tuucucaacagaucuguc

SEQ ID NO: 3066 - RNA, 18 nt, Artificial Sequence
  Antisense oligonucleotide
  misc_feature (1)..(1): BNA scaffold modification
  misc_feature (4)..(4): BNA scaffold modification
  misc_feature (18)..(18): BNA scaffold modification
tuucucaacagaucuguc

SEQ ID NO: 3067 - RNA, 18 nt, Artificial Sequence
  Antisense oligonucleotide
  misc_feature (1)..(1): BNA scaffold modification
  misc_feature (6)..(6): BNA scaffold modification
  misc_feature (18)..(18): BNA scaffold modification
tuucucaacagaucuguc

SEQ ID NO: 3068 - RNA, 18 nt, Artificial Sequence
  Antisense oligonucleotide
  misc_feature (1)..(1): BNA scaffold modification
  misc_feature (9)..(9): BNA scaffold modification
  misc_feature (18)..(18): BNA scaffold modification
tuucucaacagaucuguc

SEQ ID NO: 3069 - RNA, 18 nt, Artificial Sequence
  Antisense oligonucleotide
  misc_feature (1)..(1): BNA scaffold modification
  misc_feature (11)..(11): BNA scaffold modification
  misc_feature (18)..(18): BNA scaffold modification
tuucucaacagaucuguc

SEQ ID NO: 3070 - RNA, 18 nt, Artificial Sequence
  Antisense oligonucleotide
  misc_feature (1)..(1): BNA scaffold modification
  misc_feature (14)..(14): BNA scaffold modification
  misc_feature (18)..(18): BNA scaffold modification
tuucucaacagaucuguc

SEQ ID NO: 3071 - RNA, 18 nt, Artificial Sequence
  Antisense oligonucleotide
  misc_feature (1)..(1): BNA scaffold modification
  misc_feature (16)..(16): BNA scaffold modification
  misc_feature (18)..(18): BNA scaffold modification
tuucucaacagaucuguc

SEQ ID NO: 3072 - RNA, 18 nt, Artificial Sequence
  Antisense oligonucleotide
  misc_feature (1)..(1): BNA scaffold modification
  misc_feature (6)..(6): BNA scaffold modification
  misc_feature (11)..(11): BNA scaffold modification
  misc_feature (18)..(18): BNA scaffold modification
tuucucaacagaucuguc

SEQ ID NO: 3073 - RNA, 18 nt, Artificial Sequence
  Antisense oligonucleotide
  misc_feature (1)..(1): BNA scaffold modification
  misc_feature (9)..(9): BNA scaffold modification
  misc_feature (14)..(14): BNA scaffold modification
  misc_feature (18)..(18): BNA scaffold modification
tuucucaacagaucuguc

SEQ ID NO: 3074 - RNA, 18 nt, Artificial Sequence
  Antisense oligonucleotide
  misc_feature (1)..(1): BNA scaffold modification
  misc_feature (11)..(11): BNA scaffold modification
  misc_feature (16)..(16): BNA scaffold modification
  misc_feature (18)..(18): BNA scaffold modification
tuucucaacagaucuguc

SEQ ID NO: 3075 - RNA, 18 nt, Artificial Sequence
  Antisense oligonucleotide
  misc_feature (1)..(2): BNA scaffold modification
  misc_feature (17)..(18): BNA scaffold modification
ttucucaacagaucugtc

SEQ ID NO: 3076 - RNA, 18 nt, Artificial Sequence
  Antisense oligonucleotide
  misc_feature (1)..(2): BNA scaffold modification
  misc_feature (11)..(11): BNA scaffold modification
  misc_feature (17)..(18): BNA scaffold modification
ttucucaacagaucugtc

SEQ ID NO: 3077 - RNA, 18 nt, Artificial Sequence
  Antisense oligonucleotide
  misc_feature (1)..(1): BNA scaffold modification
  misc_feature (18)..(18): BNA scaffold modification
tucucaacagaucuguca

SEQ ID NO: 3078 - RNA, 18 nt, Artificial Sequence
  Antisense oligonucleotide
  misc_feature (1)..(1): BNA scaffold modification
  misc_feature (3)..(3): BNA scaffold modification
  misc_feature (18)..(18): BNA scaffold modification
tucucaacagaucuguca

SEQ ID NO: 3079 - RNA, 18 nt, Artificial Sequence
  Antisense oligonucleotide
  misc_feature (1)..(1): BNA scaffold modification
  misc_feature (5)..(5): BNA scaffold modification
  misc_feature (18)..(18): BNA scaffold modification
tucucaacagaucuguca

SEQ ID NO: 3080 - RNA, 18 nt, Artificial Sequence
  Antisense oligonucleotide
  misc_feature (1)..(1): BNA scaffold modification
  misc_feature (8)..(8): BNA scaffold modification
  misc_feature (18)..(18): BNA scaffold modification
tucucaacagaucuguca

SEQ ID NO: 3081 - RNA, 18 nt, Artificial Sequence
  Antisense oligonucleotide
  misc_feature (1)..(1): BNA scaffold modification
  misc_feature (10)..(10): BNA scaffold modification
  misc_feature (18)..(18): BNA scaffold modification
tucucaacagaucuguca

SEQ ID NO: 3082 - RNA, 18 nt, Artificial Sequence
  Antisense oligonucleotide
  misc_feature (1)..(1): BNA scaffold modification
  misc_feature (13)..(13): BNA scaffold modification
  misc_feature (18)..(18): BNA scaffold modification
tucucaacagaucuguca

SEQ ID NO: 3083 - RNA, 18 nt, Artificial Sequence
  Antisense oligonucleotide
  misc_feature (1)..(1): BNA scaffold modification
  misc_feature (15)..(15): BNA scaffold modification
  misc_feature (18)..(18): BNA scaffold modification
tucucaacagaucuguca

SEQ ID NO: 3084 - RNA, 18 nt, Artificial Sequence
  Antisense oligonucleotide
  misc_feature (1)..(1): BNA scaffold modification
  misc_feature (5)..(5): BNA scaffold modification
  misc_feature (13)..(13): BNA scaffold modification
  misc_feature (18)..(18): BNA scaffold modification
tucucaacagaucuguca

SEQ ID NO: 3085 - RNA, 18 nt, Artificial Sequence
  Antisense oligonucleotide
  misc_feature (1)..(1): BNA scaffold modification
  misc_feature (8)..(8): BNA scaffold modification
  misc_feature (15)..(15): BNA scaffold modification
  misc_feature (18)..(18): BNA scaffold modification
tucucaacagaucuguca

SEQ ID NO: 3086 - RNA, 18 nt, Artificial Sequence
  Antisense oligonucleotide
  misc_feature (1)..(1): BNA scaffold modification
  misc_feature (10)..(10): BNA scaffold modification
  misc_feature (15)..(15): BNA scaffold modification
  misc_feature (18)..(18): BNA scaffold modification
tucucaacagaucuguca

SEQ ID NO: 3087 - RNA, 18 nt, Artificial Sequence
  Antisense oligonucleotide
  misc_feature (1)..(2): BNA scaffold modification
  misc_feature (17)..(18): BNA scaffold modification
ttcucaacagaucuguca

SEQ ID NO: 3088 - RNA, 18 nt, Artificial Sequence
  Antisense oligonucleotide
  misc_feature (1)..(2): BNA scaffold modification
  misc_feature (10)..(10): BNA scaffold modification
  misc_feature (17)..(18): BNA scaffold modification
ttcucaacagaucuguca

SEQ ID NO: 3089 - RNA, 18 nt, Artificial Sequence
  Antisense oligonucleotide
  misc_feature (1)..(2): BNA scaffold modification
  misc_feature (8)..(8): BNA scaffold modification
  misc_feature (17)..(18): BNA scaffold modification
ttcucaacagaucuguca

SEQ ID NO: 3090 - RNA, 16 nt, Artificial Sequence
  Antisense oligonucleotide
  misc_feature (1)..(1): BNA scaffold modification
  misc_feature (16)..(16): BNA scaffold modification
gccauuucucaacaga

SEQ ID NO: 3091 - RNA, 16 nt, Artificial Sequence
  Antisense oligonucleotide
  misc_feature (1)..(1): BNA scaffold modification
  misc_feature (3)..(3): BNA scaffold modification
  misc_feature (16)..(16): BNA scaffold modification
gccauuucucaacaga

SEQ ID NO: 3092 - RNA, 16 nt, Artificial Sequence
  Antisense oligonucleotide
  misc_feature (1)..(1): BNA scaffold modification
  misc_feature (8)..(8): BNA scaffold modification
  misc_feature (16)..(16): BNA scaffold modification
gccauuucucaacaga

SEQ ID NO: 3093 - RNA, 16 nt, Artificial Sequence
  Antisense oligonucleotide
  misc_feature (1)..(1): BNA scaffold modification
  misc_feature (10)..(10): BNA scaffold modification
  misc_feature (16)..(16): BNA scaffold modification
gccauuucucaacaga

SEQ ID NO: 3094 - RNA, 16 nt, Artificial Sequence
  Antisense oligonucleotide
  misc_feature (1)..(1): BNA scaffold modification
  misc_feature (13)..(13): BNA scaffold modification
  misc_feature (16)..(16): BNA scaffold modification
gccauuucucaacaga

SEQ ID NO: 3095 - RNA, 16 nt, Artificial Sequence
  Antisense oligonucleotide
  misc_feature (1)..(1): BNA scaffold modification
  misc_feature (3)..(3): BNA scaffold modification
  misc_feature (8)..(8): BNA scaffold modification
  misc_feature (16)..(16): BNA scaffold modification
gccauuucucaacaga

SEQ ID NO: 3096 - RNA, 16 nt, Artificial Sequence
  Antisense oligonucleotide
  misc_feature (1)..(1): BNA scaffold modification
  misc_feature (8)..(8): BNA scaffold modification
  misc_feature (13)..(13): BNA scaffold modification
  misc_feature (16)..(16): BNA scaffold modification
gccauuucucaacaga

SEQ ID NO: 3097 - RNA, 16 nt, Artificial Sequence
  Antisense oligonucleotide
  misc_feature (1)..(1): BNA scaffold modification
  misc_feature (10)..(10): BNA scaffold modification
  misc_feature (15)..(16): BNA scaffold modification
gccauuucucaacaga

SEQ ID NO: 3098 - RNA, 16 nt, Artificial Sequence
  Antisense oligonucleotide
  misc_feature (1)..(1): BNA scaffold modification
  misc_feature (3)..(3): BNA scaffold modification
  misc_feature (8)..(8): BNA scaffold modification
  misc_feature (13)..(13): BNA scaffold modification
  misc_feature (16)..(16): BNA scaffold modification
gccauuucucaacaga

SEQ ID NO: 3099 - RNA, 16 nt, Artificial Sequence
  Antisense oligonucleotide
  misc_feature (1)..(1): BNA scaffold modification
  misc_feature (16)..(16): BNA scaffold modification
gccauuucucaacaga

SEQ ID NO: 3100 - RNA, 16 nt, Artificial Sequence
  Antisense oligonucleotide
  misc_feature (1)..(2): BNA scaffold modification
  misc_feature (15)..(16): BNA scaffold modification
gccauuucucaacaga

SEQ ID NO: 3101 - RNA, 16 nt, Artificial Sequence
  Antisense oligonucleotide
  misc_feature (1)..(2): BNA scaffold modification
  misc_feature (8)..(8): BNA scaffold modification
  misc_feature (15)..(16): BNA scaffold modification
gccauuucucaacaga

SEQ ID NO: 3102 - RNA, 16 nt, Artificial Sequence
  Antisense oligonucleotide
  misc_feature (1)..(1): BNA scaffold modification
  misc_feature (16)..(16): BNA scaffold modification
ccauuucucaacagat

SEQ ID NO: 3103 - RNA, 16 nt, Artificial Sequence
  Antisense oligonucleotide
  misc_feature (1)..(1): BNA scaffold modification
  misc_feature (7)..(7): BNA scaffold modification
  misc_feature (16)..(16): BNA scaffold modification
ccauuucucaacagat

SEQ ID NO: 3104 - RNA, 16 nt, Artificial Sequence
  Antisense oligonucleotide
  misc_feature (1)..(1): BNA scaffold modification
  misc_feature (9)..(9): BNA scaffold modification
  misc_feature (16)..(16): BNA scaffold modification
ccauuucucaacagat

SEQ ID NO: 3105 - RNA, 16 nt, Artificial Sequence
  Antisense oligonucleotide
  misc_feature (1)..(1): BNA scaffold modification
  misc_feature (12)..(12): BNA scaffold modification
  misc_feature (16)..(16): BNA scaffold modification
ccauuucucaacagat

SEQ ID NO: 3106 - RNA, 16 nt, Artificial Sequence
  Antisense oligonucleotide
  misc_feature (1)..(1): BNA scaffold modification
  misc_feature (14)..(14): BNA scaffold modification
  misc_feature (16)..(16): BNA scaffold modification
ccauuucucaacagat

SEQ ID NO: 3107 - RNA, 16 nt, Artificial Sequence
  Antisense oligonucleotide
  misc_feature (1)..(1): BNA scaffold modification
  misc_feature (16)..(16): BNA scaffold modification
ccauuucucaacagat

SEQ ID NO: 3108 - RNA, 16 nt, Artificial Sequence
  Antisense oligonucleotide
  misc_feature (1)..(1): BNA scaffold modification
  misc_feature (9)..(9): BNA scaffold modification
  misc_feature (14)..(14): BNA scaffold modification
  misc_feature (16)..(16): BNA scaffold modification
ccauuucucaacagat

SEQ ID NO: 3109 - RNA, 16 nt, Artificial Sequence
  Antisense oligonucleotide
  misc_feature (1)..(1): BNA scaffold modification
  misc_feature (7)..(7): BNA scaffold modification
  misc_feature (14)..(14): BNA scaffold modification
  misc_feature (16)..(16): BNA scaffold modification
ccauuucucaacagat

SEQ ID NO: 3110 - RNA, 16 nt, Artificial Sequence
  Antisense oligonucleotide
  misc_feature (1)..(1): BNA scaffold modification
  misc_feature (7)..(7): BNA scaffold modification
  misc_feature (12)..(12): BNA scaffold modification
  misc_feature (16)..(16): BNA scaffold modification
ccauuucucaacagat

SEQ ID NO: 3111 - RNA, 16 nt, Artificial Sequence
  Antisense oligonucleotide
  misc_feature (1)..(2): BNA scaffold modification
  misc_feature (15)..(16): BNA scaffold modification
ccauuucucaacagat

SEQ ID NO: 3112 - RNA, 16 nt, Artificial Sequence
  Antisense oligonucleotide
  misc_feature (1)..(1): BNA scaffold modification
  misc_feature (7)..(7): BNA scaffold modification
  misc_feature (12)..(12): BNA scaffold modification
  misc_feature (15)..(16): BNA scaffold modification
ccauuucucaacagat

SEQ ID NO: 3113 - RNA, 16 nt, Artificial Sequence
  Antisense oligonucleotide
  misc_feature (1)..(1): BNA scaffold modification
  misc_feature (16)..(16): BNA scaffold modification
cauuucucaacagauc

SEQ ID NO: 3114 - RNA, 16 nt, Artificial Sequence
  Antisense oligonucleotide
  misc_feature (1)..(1): BNA scaffold modification
  misc_feature (13)..(13): BNA scaffold modification
  misc_feature (16)..(16): BNA scaffold modification
cauuucucaacagauc

SEQ ID NO: 3115 - RNA, 16 nt, Artificial Sequence
  Antisense oligonucleotide
  misc_feature (1)..(1): BNA scaffold modification
  misc_feature (11)..(11): BNA scaffold modification
  misc_feature (16)..(16): BNA scaffold modification
cauuucucaacagauc

SEQ ID NO: 3116 - RNA, 16 nt, Artificial Sequence
  Antisense oligonucleotide
  misc_feature (1)..(1): BNA scaffold modification
  misc_feature (8)..(8): BNA scaffold modification
  misc_feature (16)..(16): BNA scaffold modification
cauuucucaacagauc

SEQ ID NO: 3117 - RNA, 16 nt, Artificial Sequence
  Antisense oligonucleotide
  misc_feature (1)..(1): BNA scaffold modification
  misc_feature (6)..(6): BNA scaffold modification
  misc_feature (16)..(16): BNA scaffold modification
cauuucucaacagauc

SEQ ID NO: 3118 - RNA, 16 nt, Artificial Sequence
  Antisense oligonucleotide
  misc_feature (1)..(1): BNA scaffold modification
  misc_feature (6)..(6): BNA scaffold modification
  misc_feature (13)..(13): BNA scaffold modification
  misc_feature (16)..(16): BNA scaffold modification
cauuucucaacagauc

SEQ ID NO: 3119 - RNA, 16 nt, Artificial Sequence
  Antisense oligonucleotide
  misc_feature (1)..(1): BNA scaffold modification
  misc_feature (8)..(8): BNA scaffold modification
  misc_feature (13)..(13): BNA scaffold modification
  misc_feature (16)..(16): BNA scaffold modification
cauuucucaacagauc

SEQ ID NO: 3120 - RNA, 16 nt, Artificial Sequence
  Antisense oligonucleotide
  misc_feature (1)..(1): BNA scaffold modification
  misc_feature (8)..(8): BNA scaffold modification
  misc_feature (11)..(11): BNA scaffold modification
  misc_feature (16)..(16): BNA scaffold modification
cauuucucaacagauc

SEQ ID NO: 3121 - RNA, 16 nt, Artificial Sequence
  Antisense oligonucleotide
  misc_feature (1)..(1): BNA scaffold modification
  misc_feature (6)..(6): BNA scaffold modification
  misc_feature (11)..(11): BNA scaffold modification
  misc_feature (16)..(16): BNA scaffold modification
cauuucucaacagauc

SEQ ID NO: 3122 - RNA, 16 nt, Artificial Sequence
  Antisense oligonucleotide
  misc_feature (1)..(2): BNA scaffold modification
  misc_feature (15)..(16): BNA scaffold modification
cauuucucaacagatc

SEQ ID NO: 3123 - RNA, 16 nt, Artificial Sequence
  Antisense oligonucleotide
  misc_feature (1)..(1): BNA scaffold modification
  misc_feature (6)..(6): BNA scaffold modification
  misc_feature (11)..(11): BNA scaffold modification
  misc_feature (15)..(16): BNA scaffold modification
cauuucucaacagatc

SEQ ID NO: 3124 - RNA, 16 nt, Artificial Sequence
  Antisense oligonucleotide
  misc_feature (1)..(1): BNA scaffold modification
  misc_feature (16)..(16): BNA scaffold modification
auuucucaacagauct

SEQ ID NO: 3125 - RNA, 16 nt, Artificial Sequence
  Antisense oligonucleotide
  misc_feature (1)..(1): BNA scaffold modification
  misc_feature (5)..(5): BNA scaffold modification
  misc_feature (16)..(16): BNA scaffold modification
auuucucaacagauct

SEQ ID NO: 3126 - RNA, 16 nt, Artificial Sequence
  Antisense oligonucleotide
  misc_feature (1)..(1): BNA scaffold modification
  misc_feature (7)..(7): BNA scaffold modification
  misc_feature (16)..(16): BNA scaffold modification
auuucucaacagauct

SEQ ID NO: 3127 - RNA, 16 nt, Artificial Sequence
  Antisense oligonucleotide
  misc_feature (1)..(1): BNA scaffold modification
  misc_feature (10)..(10): BNA scaffold modification
  misc_feature (16)..(16): BNA scaffold modification
auuucucaacagauct

SEQ ID NO: 3128 - RNA, 16 nt, Artificial Sequence
  Antisense oligonucleotide
  misc_feature (1)..(1): BNA scaffold modification
  misc_feature (12)..(12): BNA scaffold modification
  misc_feature (16)..(16): BNA scaffold modification
auuucucaacagauct

SEQ ID NO: 3129 - RNA, 16 nt, Artificial Sequence
  Antisense oligonucleotide
  misc_feature (1)..(1): BNA scaffold modification
  misc_feature (5)..(5): BNA scaffold modification
  misc_feature (12)..(12): BNA scaffold modification
  misc_feature (16)..(16): BNA scaffold modification
auuucucaacagauct

SEQ ID NO: 3130 - RNA, 16 nt, Artificial Sequence
  Antisense oligonucleotide
  misc_feature (1)..(1): BNA scaffold modification
  misc_feature (7)..(7): BNA scaffold modification
  misc_feature (12)..(12): BNA scaffold modification
  misc_feature (16)..(16): BNA scaffold modification
auuucucaacagauct

SEQ ID NO: 3131 - RNA, 16 nt, Artificial Sequence
  Antisense oligonucleotide
  misc_feature (1)..(1): BNA scaffold modification
  misc_feature (5)..(5): BNA scaffold modification
  misc_feature (10)..(10): BNA scaffold modification
  misc_feature (16)..(16): BNA scaffold modification
auuucucaacagauct

SEQ ID NO: 3132 - RNA, 16 nt, Artificial Sequence
  Antisense oligonucleotide
  misc_feature (1)..(1): BNA scaffold modification
  misc_feature (12)..(12): BNA scaffold modification
  misc_feature (15)..(16): BNA scaffold modification
auuucucaacagauct

SEQ ID NO: 3133 - RNA, 16 nt, Artificial Sequence
  Antisense oligonucleotide
  misc_feature (1)..(2): BNA scaffold modification
  misc_feature (15)..(16): BNA scaffold modification
atuucucaacagauct

SEQ ID NO: 3134 - RNA, 16 nt, Artificial Sequence
  Antisense oligonucleotide
  misc_feature (1)..(1): BNA scaffold modification
  misc_feature (5)..(5): BNA scaffold modification
  misc_feature (10)..(10): BNA scaffold modification
  misc_feature (15)..(16): BNA scaffold modification
auuucucaacagauct

SEQ ID NO: 3135 - RNA, 16 nt, Artificial Sequence
  Antisense oligonucleotide
  misc_feature (1)..(1): BNA scaffold modification
  misc_feature (5)..(5): BNA scaffold modification
  misc_feature (12)..(12): BNA scaffold modification
  misc_feature (15)..(16): BNA scaffold modification
auuucucaacagauct

SEQ ID NO: 3136 - RNA, 16 nt, Artificial Sequence
  Antisense oligonucleotide
  misc_feature (1)..(1): BNA scaffold modification
  misc_feature (16)..(16): BNA scaffold modification
tuucucaacagaucug

SEQ ID NO: 3137 - RNA, 16 nt, Artificial Sequence
  Antisense oligonucleotide
  misc_feature (1)..(1): BNA scaffold modification
  misc_feature (14)..(14): BNA scaffold modification
  misc_feature (16)..(16): BNA scaffold modification
tuucucaacagaucug

SEQ ID NO: 3138 - RNA, 16 nt, Artificial Sequence
  Antisense oligonucleotide
  misc_feature (1)..(1): BNA scaffold modification
  misc_feature (11)..(11): BNA scaffold modification
  misc_feature (16)..(16): BNA scaffold modification
tuucucaacagaucug

SEQ ID NO: 3139 - RNA, 16 nt, Artificial Sequence
  Antisense oligonucleotide
  misc_feature (1)..(1): BNA scaffold modification
  misc_feature (9)..(9): BNA scaffold modification
  misc_feature (16)..(16): BNA scaffold modification
tuucucaacagaucug

SEQ ID NO: 3140 - RNA, 16 nt, Artificial Sequence
  Antisense oligonucleotide
  misc_feature (1)..(1): BNA scaffold modification
  misc_feature (6)..(6): BNA scaffold modification
  misc_feature (16)..(16): BNA scaffold modification
tuucucaacagaucug

SEQ ID NO: 3141 - RNA, 16 nt, Artificial Sequence
  Antisense oligonucleotide
  misc_feature (1)..(1): BNA scaffold modification
  misc_feature (4)..(4): BNA scaffold modification
  misc_feature (16)..(16): BNA scaffold modification
tuucucaacagaucug

SEQ ID NO: 3142 - RNA, 16 nt, Artificial Sequence
  Antisense oligonucleotide
  misc_feature (1)..(1): BNA scaffold modification
  misc_feature (4)..(4): BNA scaffold modification
  misc_feature (14)..(14): BNA scaffold modification
  misc_feature (16)..(16): BNA scaffold modification
tuucucaacagaucug

SEQ ID NO: 3143 - RNA, 16 nt, Artificial Sequence
  Antisense oligonucleotide
  misc_feature (1)..(1): BNA scaffold modification
  misc_feature (6)..(6): BNA scaffold modification
  misc_feature (11)..(11): BNA scaffold modification
  misc_feature (16)..(16): BNA scaffold modification
tuucucaacagaucug

SEQ ID NO: 3144 - RNA, 16 nt, Artificial Sequence
  Antisense oligonucleotide
  misc_feature (1)..(1): BNA scaffold modification
  misc_feature (11)..(11): BNA scaffold modification
  misc_feature (15)..(16): BNA scaffold modification
tuucucaacagauctg

SEQ ID NO: 3145 - RNA, 16 nt, Artificial Sequence
  Antisense oligonucleotide
  misc_feature (1)..(1): BNA scaffold modification
  misc_feature (4)..(4): BNA scaffold modification
  misc_feature (9)..(9): BNA scaffold modification
  misc_feature (15)..(16): BNA scaffold modification
tuucucaacagauctg

SEQ ID NO: 3146 - RNA, 16 nt, Artificial Sequence
  Antisense oligonucleotide
  misc_feature (1)..(2): BNA scaffold modification
  misc_feature (15)..(16): BNA scaffold modification
ttucucaacagauctg

SEQ ID NO: 3147 - RNA, 16 nt, Artificial Sequence
  Antisense oligonucleotide
  misc_feature (1)..(1): BNA scaffold modification
  misc_feature (16)..(16): BNA scaffold modification
tucucaacagaucugt

SEQ ID NO: 3148 - RNA, 16 nt, Artificial Sequence
  Antisense oligonucleotide
  misc_feature (1)..(1): BNA scaffold modification
  misc_feature (15)..(16): BNA scaffold modification
tucucaacagaucugt

SEQ ID NO: 3149 - RNA, 16 nt, Artificial Sequence
  Antisense oligonucleotide
  misc_feature (1)..(1): BNA scaffold modification
  misc_feature (13)..(13): BNA scaffold modification
  misc_feature (16)..(16): BNA scaffold modification
tucucaacagaucugt

SEQ ID NO: 3150 - RNA, 16 nt, Artificial Sequence
  Antisense oligonucleotide
  misc_feature (1)..(1): BNA scaffold modification
  misc_feature (10)..(10): BNA scaffold modification
  misc_feature (16)..(16): BNA scaffold modification
tucucaacagaucugt

SEQ ID NO: 3151 - RNA, 16 nt, Artificial Sequence
  Antisense oligonucleotide
  misc_feature (1)..(1): BNA scaffold modification
  misc_feature (8)..(8): BNA scaffold modification
  misc_feature (16)..(16): BNA scaffold modification
tucucaacagaucugt

SEQ ID NO: 3152 - RNA, 16 nt, Artificial Sequence
  Antisense oligonucleotide
  misc_feature (1)..(1): BNA scaffold modification
  misc_feature (5)..(5): BNA scaffold modification
  misc_feature (16)..(16): BNA scaffold modification
tucucaacagaucugt

SEQ ID NO: 3153 - RNA, 16 nt, Artificial Sequence
  Antisense oligonucleotide
  misc_feature (1)..(1): BNA scaffold modification
  misc_feature (3)..(3): BNA scaffold modification
  misc_feature (16)..(16): BNA scaffold modification
tucucaacagaucugt

SEQ ID NO: 3154 - RNA, 16 nt, Artificial Sequence
  Antisense oligonucleotide
  misc_feature (1)..(1): BNA scaffold modification
  misc_feature (10)..(10): BNA scaffold modification
  misc_feature (15)..(16): BNA scaffold modification
tucucaacagaucugt

SEQ ID NO: 3155 - RNA, 16 nt, Artificial Sequence
  Antisense oligonucleotide
  misc_feature (1)..(1): BNA scaffold modification
  misc_feature (8)..(8): BNA scaffold modification
  misc_feature (13)..(13): BNA scaffold modification
  misc_feature (16)..(16): BNA scaffold modification
tucucaacagaucugt

SEQ ID NO: 3156 - RNA, 16 nt, Artificial Sequence
  Antisense oligonucleotide
  misc_feature (1)..(1): BNA scaffold modification
  misc_feature (3)..(3): BNA scaffold modification
  misc_feature (8)..(8): BNA scaffold modification
  misc_feature (16)..(16): BNA scaffold modification
tucucaacagaucugt

SEQ ID NO: 3157 - RNA, 16 nt, Artificial Sequence
  Antisense oligonucleotide
  misc_feature (1)..(1): BNA scaffold modification
  misc_feature (5)..(5): BNA scaffold modification
  misc_feature (10)..(10): BNA scaffold modification
  misc_feature (15)..(16): BNA scaffold modification
tucucaacagaucugt

SEQ ID NO: 3158 - RNA, 16 nt, Artificial Sequence
  Antisense oligonucleotide
  misc_feature (1)..(2): BNA scaffold modification
  misc_feature (15)..(16): BNA scaffold modification
ttcucaacagaucugt

SEQ ID NO: 3159 - RNA, 16 nt, Artificial Sequence
  Antisense oligonucleotide
  misc_feature (1)..(2): BNA scaffold modification
  misc_feature (10)..(10): BNA scaffold modification
  misc_feature (15)..(16): BNA scaffold modification
ttcucaacagaucugt

SEQ ID NO: 3160 - RNA, 16 nt, Artificial Sequence
  Antisense oligonucleotide
  misc_feature (1)..(1): BNA scaffold modification
  misc_feature (16)..(16): BNA scaffold modification
tcucaacagaucuguc

SEQ ID NO: 3161 - RNA, 16 nt, Artificial Sequence
  Antisense oligonucleotide
  misc_feature (1)..(1): BNA scaffold modification
  misc_feature (14)..(14): BNA scaffold modification
  misc_feature (16)..(16): BNA scaffold modification
tcucaacagaucuguc

SEQ ID NO: 3162 - RNA, 16 nt, Artificial Sequence
  Antisense oligonucleotide
  misc_feature (1)..(1): BNA scaffold modification
  misc_feature (12)..(12): BNA scaffold modification
  misc_feature (16)..(16): BNA scaffold modification
tcucaacagaucuguc

SEQ ID NO: 3163 - RNA, 16 nt, Artificial Sequence
  Antisense oligonucleotide
  misc_feature (1)..(1): BNA scaffold modification
  misc_feature (9)..(9): BNA scaffold modification
  misc_feature (16)..(16): BNA scaffold modification
tcucaacagaucuguc

SEQ ID NO: 3164 - RNA, 16 nt, Artificial Sequence
  Antisense oligonucleotide
  misc_feature (1)..(1): BNA scaffold modification
  misc_feature (7)..(7): BNA scaffold modification
  misc_feature (16)..(16): BNA scaffold modification
tcucaacagaucuguc

SEQ ID NO: 3165 - RNA, 16 nt, Artificial Sequence
  Antisense oligonucleotide
  misc_feature (1)..(1): BNA scaffold modification
  misc_feature (4)..(4): BNA scaffold modification
  misc_feature (16)..(16): BNA scaffold modification
tcucaacagaucuguc

SEQ ID NO: 3166 - RNA, 16 nt, Artificial Sequence
  Antisense oligonucleotide
  misc_feature (1)..(2): BNA scaffold modification
  misc_feature (16)..(16): BNA scaffold modification
tcucaacagaucuguc

SEQ ID NO: 3167 - RNA, 16 nt, Artificial Sequence
  Antisense oligonucleotide
  misc_feature (1)..(1): BNA scaffold modification
  misc_feature (9)..(9): BNA scaffold modification
  misc_feature (14)..(14): BNA scaffold modification
  misc_feature (16)..(16): BNA scaffold modification
tcucaacagaucuguc

SEQ ID NO: 3168 - RNA, 16 nt, Artificial Sequence
  Antisense oligonucleotide
  misc_feature (1)..(1): BNA scaffold modification
  misc_feature (7)..(7): BNA scaffold modification
  misc_feature (12)..(12): BNA scaffold modification
  misc_feature (16)..(16): BNA scaffold modification
tcucaacagaucuguc

SEQ ID NO: 3169 - RNA, 16 nt, Artificial Sequence
  Antisense oligonucleotide
  misc_feature (1)..(1): BNA scaffold modification
  misc_feature (4)..(4): BNA scaffold modification
  misc_feature (9)..(9): BNA scaffold modification
  misc_feature (16)..(16): BNA scaffold modification
tcucaacagaucuguc

SEQ ID NO: 3170 - RNA, 16 nt, Artificial Sequence
  Antisense oligonucleotide
  misc_feature (1)..(2): BNA scaffold modification
  misc_feature (15)..(16): BNA scaffold modification
tcucaacagaucugtc

SEQ ID NO: 3171 - RNA, 16 nt, Artificial Sequence
  Antisense oligonucleotide
  misc_feature (1)..(2): BNA scaffold modification
  misc_feature (9)..(9): BNA scaffold modification
  misc_feature (15)..(16): BNA scaffold modification
tcucaacagaucugtc

SEQ ID NO: 3172 - RNA, 16 nt, Artificial Sequence
  Antisense oligonucleotide
  misc_feature (1)..(1): BNA scaffold modification
  misc_feature (16)..(16): BNA scaffold modification
cucaacagaucuguca

SEQ ID NO: 3173 - RNA, 16 nt, Artificial Sequence
  Antisense oligonucleotide
  misc_feature (1)..(1): BNA scaffold modification
  misc_feature (15)..(16): BNA scaffold modification
cucaacagaucuguca

SEQ ID NO: 3174 - RNA, 16 nt, Artificial Sequence
  Antisense oligonucleotide
  misc_feature (1)..(1): BNA scaffold modification
  misc_feature (13)..(13): BNA scaffold modification
  misc_feature (16)..(16): BNA scaffold modification
cucaacagaucuguca

SEQ ID NO: 3175 - RNA, 16 nt, Artificial Sequence
  Antisense oligonucleotide
  misc_feature (1)..(1): BNA scaffold modification
  misc_feature (11)..(11): BNA scaffold modification
  misc_feature (16)..(16): BNA scaffold modification
cucaacagaucuguca

SEQ ID NO: 3176 - RNA, 16 nt, Artificial Sequence
  Antisense oligonucleotide
  misc_feature (1)..(1): BNA scaffold modification
  misc_feature (8)..(8): BNA scaffold modification
  misc_feature (16)..(16): BNA scaffold modification
cucaacagaucuguca

SEQ ID NO: 3177 - RNA, 16 nt, Artificial Sequence
  Antisense oligonucleotide
  misc_feature (1)..(1): BNA scaffold modification
  misc_feature (6)..(6): BNA scaffold modification
  misc_feature (16)..(16): BNA scaffold modification
cucaacagaucuguca

SEQ ID NO: 3178 - RNA, 16 nt, Artificial Sequence
  Antisense oligonucleotide
  misc_feature (1)..(1): BNA scaffold modification
  misc_feature (3)..(3): BNA scaffold modification
  misc_feature (16)..(16): BNA scaffold modification
cucaacagaucuguca

SEQ ID NO: 3179 - RNA, 16 nt, Artificial Sequence
  Antisense oligonucleotide
  misc_feature (1)..(1): BNA scaffold modification
  misc_feature (8)..(8): BNA scaffold modification
  misc_feature (13)..(13): BNA scaffold modification
  misc_feature (16)..(16): BNA scaffold modification
cucaacagaucuguca

SEQ ID NO: 3180 - RNA, 16 nt, Artificial Sequence
  Antisense oligonucleotide
  misc_feature (1)..(1): BNA scaffold modification
  misc_feature (6)..(6): BNA scaffold modification
  misc_feature (11)..(11): BNA scaffold modification
  misc_feature (16)..(16): BNA scaffold modification
cucaacagaucuguca

SEQ ID NO: 3181 - RNA, 16 nt, Artificial Sequence
  Antisense oligonucleotide
  misc_feature (1)..(1): BNA scaffold modification
  misc_feature (3)..(3): BNA scaffold modification
  misc_feature (13)..(13): BNA scaffold modification
  misc_feature (16)..(16): BNA scaffold modification
cucaacagaucuguca

SEQ ID NO: 3182 - RNA, 16 nt, Artificial Sequence
  Antisense oligonucleotide
  misc_feature (1)..(2): BNA scaffold modification
  misc_feature (15)..(16): BNA scaffold modification
ctcaacagaucuguca

SEQ ID NO: 3183 - RNA, 16 nt, Artificial Sequence
  Antisense oligonucleotide
  misc_feature (1)..(2): BNA scaffold modification
  misc_feature (8)..(8): BNA scaffold modification
  misc_feature (15)..(16): BNA scaffold modification
cucaacagaucuguca

SEQ ID NO: 3184 - RNA, 16 nt, Artificial Sequence
  Antisense oligonucleotide
  misc_feature (1)..(1): BNA scaffold modification
  misc_feature (3)..(3): BNA scaffold modification
  misc_feature (8)..(8): BNA scaffold modification
  misc_feature (13)..(13): BNA scaffold modification
  misc_feature (16)..(16): BNA scaffold modification
cucaacagaucuguca

SEQ ID NO: 3185 - RNA, 25 nt, Artificial Sequence
  Antisense oligonucleotide
  misc_feature (1)..(1): BNA scaffold modification
  misc_feature (25)..(25): BNA scaffold modification
tuugccgcugcccaaugccauccug

SEQ ID NO: 3186 - RNA, 25 nt, Artificial Sequence
  Antisense oligonucleotide
  misc_feature (1)..(1): BNA scaffold modification
  misc_feature (4)..(4): BNA scaffold modification
  misc_feature (25)..(25): BNA scaffold modification
tuugccgcugcccaaugccauccug

SEQ ID NO: 3187 - RNA, 25 nt, Artificial Sequence
  Antisense oligonucleotide
  misc_feature (1)..(1): BNA scaffold modification
  misc_feature (7)..(7): BNA scaffold modification
  misc_feature (25)..(25): BNA scaffold modification
tuugccgcugcccaaugccauccug

SEQ ID NO: 3188 - RNA, 25 nt, Artificial Sequence
  Antisense oligonucleotide
  misc_feature (1)..(1): BNA scaffold modification
  misc_feature (10)..(10): BNA scaffold modification
  misc_feature (25)..(25): BNA scaffold modification
tuugccgcugcccaaugccauccug

SEQ ID NO: 3189 - RNA, 25 nt, Artificial Sequence
  Antisense oligonucleotide
  misc_feature (1)..(1): BNA scaffold modification
  misc_feature (17)..(17): BNA scaffold modification
  misc_feature (25)..(25): BNA scaffold modification
tuugccgcugcccaaugccauccug

SEQ ID NO: 3190 - RNA, 25 nt, Artificial Sequence
  Antisense oligonucleotide
  misc_feature (1)..(1): BNA scaffold modification
  misc_feature (5)..(5): BNA scaffold modification
  misc_feature (25)..(25): BNA scaffold modification
tuugccgcugcccaaugccauccug

SEQ ID NO: 3191 - RNA, 25 nt, Artificial Sequence
  Antisense oligonucleotide
  misc_feature (1)..(1): BNA scaffold modification
  misc_feature (8)..(8): BNA scaffold modification
  misc_feature (25)..(25): BNA scaffold modification
tuugccgcugcccaaugccauccug

SEQ ID NO: 3192 - RNA, 25 nt, Artificial Sequence
  Antisense oligonucleotide
  misc_feature (1)..(1): BNA scaffold modification
  misc_feature (12)..(12): BNA scaffold modification
  misc_feature (25)..(25): BNA scaffold modification
tuugccgcugcccaaugccauccug

SEQ ID NO: 3193 - RNA, 25 nt, Artificial Sequence
  Antisense oligonucleotide
  misc_feature (1)..(1): BNA scaffold modification
  misc_feature (18)..(18): BNA scaffold modification
  misc_feature (25)..(25): BNA scaffold modification
tuugccgcugcccaaugccauccug

SEQ ID NO: 3194 - RNA, 25 nt, Artificial Sequence
  Antisense oligonucleotide
  misc_feature (1)..(1): BNA scaffold modification
  misc_feature (22)..(22): BNA scaffold modification
  misc_feature (25)..(25): BNA scaffold modification
tuugccgcugcccaaugccauccug

SEQ ID NO: 3195 - RNA, 25 nt, Artificial Sequence
  Antisense oligonucleotide
  misc_feature (1)..(1): BNA scaffold modification
  misc_feature (10)..(10): BNA scaffold modification
  misc_feature (17)..(17): BNA scaffold modification
  misc_feature (25)..(25): BNA scaffold modification
tuugccgcugcccaaugccauccug

SEQ ID NO: 3196 - RNA, 25 nt, Artificial Sequence
  Antisense oligonucleotide
  misc_feature (1)..(1): BNA scaffold modification
  misc_feature (4)..(4): BNA scaffold modification
  misc_feature (17)..(17): BNA scaffold modification
  misc_feature (25)..(25): BNA scaffold modification
tuugccgcugcccaaugccauccug

SEQ ID NO: 3197 - RNA, 25 nt, Artificial Sequence
  Antisense oligonucleotide
  misc_feature (1)..(1): BNA scaffold modification
  misc_feature (4)..(4): BNA scaffold modification
  misc_feature (7)..(7): BNA scaffold modification
  misc_feature (17)..(17): BNA scaffold modification
  misc_feature (25)..(25): BNA scaffold modification
tuugccgcugcccaaugccauccug

SEQ ID NO: 3198 - RNA, 25 nt, Artificial Sequence
  Antisense oligonucleotide
  misc_feature (1)..(1): BNA scaffold modification
  misc_feature (4)..(4): BNA scaffold modification
  misc_feature (10)..(10): BNA scaffold modification
  misc_feature (17)..(17): BNA scaffold modification
  misc_feature (25)..(25): BNA scaffold modification
tuugccgcugcccaaugccauccug

SEQ ID NO: 3199 - RNA, 25 nt, Artificial Sequence
  Antisense oligonucleotide
  misc_feature (1)..(2): BNA scaffold modification
  misc_feature (24)..(25): BNA scaffold modification
ttugccgcugcccaaugccaucctg

SEQ ID NO: 3200 - RNA, 25 nt, Artificial Sequence
  Antisense oligonucleotide
  misc_feature (1)..(2): BNA scaffold modification
  misc_feature (10)..(10): BNA scaffold modification
  misc_feature (17)..(17): BNA scaffold modification
  misc_feature (24)..(25): BNA scaffold modification
ttugccgcugcccaaugccaucctg

SEQ ID NO: 3201 - RNA, 22 nt, Artificial Sequence
  Antisense oligonucleotide
  misc_feature (1)..(1): BNA scaffold modification
  misc_feature (4)..(4): BNA scaffold modification
  misc_feature (22)..(22): BNA scaffold modification
tuugccgcugcccaaugccauc

SEQ ID NO: 3202 - RNA, 22 nt, Artificial Sequence
  Antisense oligonucleotide
  misc_feature (1)..(1): BNA scaffold modification
  misc_feature (7)..(7): BNA scaffold modification
  misc_feature (22)..(22): BNA scaffold modification
tuugccgcugcccaaugccauc

SEQ ID NO: 3203 - RNA, 22 nt, Artificial Sequence
  Antisense oligonucleotide
  misc_feature (1)..(1): BNA scaffold modification
  misc_feature (10)..(10): BNA scaffold modification
  misc_feature (22)..(22): BNA scaffold modification
tuugccgcugcccaaugccauc

SEQ ID NO: 3204 - RNA, 22 nt, Artificial Sequence
  Antisense oligonucleotide
  misc_feature (1)..(1): BNA scaffold modification
  misc_feature (17)..(17): BNA scaffold modification
  misc_feature (22)..(22): BNA scaffold modification
tuugccgcugcccaaugccauc

SEQ ID NO: 3205 - RNA, 22 nt, Artificial Sequence
  Antisense oligonucleotide
  misc_feature (1)..(1): BNA scaffold modification
  misc_feature (8)..(8): BNA scaffold modification
  misc_feature (22)..(22): BNA scaffold modification
tuugccgcugcccaaugccauc

SEQ ID NO: 3206 - RNA, 22 nt, Artificial Sequence
  Antisense oligonucleotide
  misc_feature (1)..(1): BNA scaffold modification
  misc_feature (13)..(13): BNA scaffold modification
  misc_feature (22)..(22): BNA scaffold modification
tuugccgcugcccaaugccauc

SEQ ID NO: 3207 - RNA, 22 nt, Artificial Sequence
  Antisense oligonucleotide
  misc_feature (1)..(1): BNA scaffold modification
  misc_feature (19)..(19): BNA scaffold modification
  misc_feature (22)..(22): BNA scaffold modification
tuugccgcugcccaaugccauc

SEQ ID NO: 3208 - RNA, 22 nt, Artificial Sequence
  Antisense oligonucleotide
  misc_feature (1)..(1): BNA scaffold modification
  misc_feature (10)..(10): BNA scaffold modification
  misc_feature (17)..(17): BNA scaffold modification
  misc_feature (22)..(22): BNA scaffold modification
tuugccgcugcccaaugccauc

SEQ ID NO: 3209 - RNA, 22 nt, Artificial Sequence
  Antisense oligonucleotide
  misc_feature (1)..(1): BNA scaffold modification
  misc_feature (4)..(4): BNA scaffold modification
  misc_feature (17)..(17): BNA scaffold modification
  misc_feature (22)..(22): BNA scaffold modification
tuugccgcugcccaaugccauc

SEQ ID NO: 3210 - RNA, 22 nt, Artificial Sequence
  Antisense oligonucleotide
  misc_feature (1)..(1): BNA scaffold modification
  misc_feature (4)..(4): BNA scaffold modification
  misc_feature (10)..(10): BNA scaffold modification
  misc_feature (17)..(17): BNA scaffold modification
  misc_feature (22)..(22): BNA scaffold modification
tuugccgcugcccaaugccauc

SEQ ID NO: 3211 - RNA, 22 nt, Artificial Sequence
  Antisense oligonucleotide
  misc_feature (1)..(1): BNA scaffold modification
  misc_feature (8)..(8): BNA scaffold modification
  misc_feature (13)..(13): BNA scaffold modification
  misc_feature (19)..(19): BNA scaffold modification
  misc_feature (22)..(22): BNA scaffold modification
tuugccgcugcccaaugccauc

SEQ ID NO: 3212 - RNA, 22 nt, Artificial Sequence
  Antisense oligonucleotide
  misc_feature (1)..(2): BNA scaffold modification
  misc_feature (21)..(22): BNA scaffold modification
ttugccgcugcccaaugccatc

SEQ ID NO: 3213 - RNA, 22 nt, Artificial Sequence
  Antisense oligonucleotide
  misc_feature (1)..(2): BNA scaffold modification
  misc_feature (10)..(10): BNA scaffold modification
  misc_feature (21)..(22): BNA scaffold modification
ttugccgcugcccaaugccatc

SEQ ID NO: 3214 - RNA, 22 nt, Artificial Sequence
  Antisense oligonucleotide
  misc_feature (1)..(1): BNA scaffold modification
  misc_feature (4)..(4): BNA scaffold modification
  misc_feature (17)..(17): BNA scaffold modification
  misc_feature (21)..(22): BNA scaffold modification
tuugccgcugcccaaugccatc

SEQ ID NO: 3215 - RNA, 22 nt, Artificial Sequence
  Antisense oligonucleotide
  misc_feature (1)..(1): BNA scaffold modification
  misc_feature (4)..(4): BNA scaffold modification
  misc_feature (10)..(10): BNA scaffold modification
  misc_feature (21)..(22): BNA scaffold modification
tuugccgcugcccaaugccatc

SEQ ID NO: 3216 - RNA, 22 nt, Artificial Sequence
  Antisense oligonucleotide
  misc_feature (1)..(1): BNA scaffold modification
  misc_feature (22)..(22): BNA scaffold modification
gccgcugcccaaugccauccug

SEQ ID NO: 3217 - RNA, 22 nt, Artificial Sequence
  Antisense oligonucleotide
  misc_feature (1)..(1): BNA scaffold modification
  misc_feature (4)..(4): BNA scaffold modification
  misc_feature (22)..(22): BNA scaffold modification
gccgcugcccaaugccauccug

SEQ ID NO: 3218 - RNA, 22 nt, Artificial Sequence
  Antisense oligonucleotide
  misc_feature (1)..(1): BNA scaffold modification
  misc_feature (7)..(7): BNA scaffold modification
  misc_feature (22)..(22): BNA scaffold modification
gccgcugcccaaugccauccug

SEQ ID NO: 3219 - RNA, 22 nt, Artificial Sequence
  Antisense oligonucleotide
  misc_feature (1)..(1): BNA scaffold modification
  misc_feature (14)..(14): BNA scaffold modification
  misc_feature (22)..(22): BNA scaffold modification
gccgcugcccaaugccauccug

SEQ ID NO: 3220 - RNA, 22 nt, Artificial Sequence
  Antisense oligonucleotide
  misc_feature (1)..(1): BNA scaffold modification
  misc_feature (22)..(22): BNA scaffold modification
gccgcugcccaaugccauccug

SEQ ID NO: 3221 - RNA, 22 nt, Artificial Sequence
  Antisense oligonucleotide
  misc_feature (1)..(1): BNA scaffold modification
  misc_feature (10)..(10): BNA scaffold modification
  misc_feature (22)..(22): BNA scaffold modification
gccgcugcccaaugccauccug

SEQ ID NO: 3222 - RNA, 22 nt, Artificial Sequence
  Antisense oligonucleotide
  misc_feature (1)..(1): BNA scaffold modification
  misc_feature (16)..(16): BNA scaffold modification
  misc_feature (22)..(22): BNA scaffold modification
gccgcugcccaaugccauccug

SEQ ID NO: 3223 - RNA, 22 nt, Artificial Sequence
  Antisense oligonucleotide
  misc_feature (1)..(1): BNA scaffold modification
  misc_feature (20)..(20): BNA scaffold modification
  misc_feature (22)..(22): BNA scaffold modification
gccgcugcccaaugccauccug

SEQ ID NO: 3224 - RNA, 22 nt, Artificial Sequence
  Antisense oligonucleotide
  misc_feature (1)..(1): BNA scaffold modification
  misc_feature (7)..(7): BNA scaffold modification
  misc_feature (14)..(14): BNA scaffold modification
  misc_feature (22)..(22): BNA scaffold modification
gccgcugcccaaugccauccug

SEQ ID NO: 3225 - RNA, 22 nt, Artificial Sequence
  Antisense oligonucleotide
  misc_feature (1)..(1): BNA scaffold modification
  misc_feature (10)..(10): BNA scaffold modification
  misc_feature (19)..(19): BNA scaffold modification
  misc_feature (22)..(22): BNA scaffold modification
gccgcugcccaaugccauccug

SEQ ID NO: 3226 - RNA, 22 nt, Artificial Sequence
  Antisense oligonucleotide
  misc_feature (1)..(1): BNA scaffold modification
  misc_feature (10)..(10): BNA scaffold modification
  misc_feature (16)..(16): BNA scaffold modification
  misc_feature (20)..(20): BNA scaffold modification
  misc_feature (22)..(22): BNA scaffold modification
gccgcugcccaaugccauccug

SEQ ID NO: 3227 - RNA, 22 nt, Artificial Sequence
  Antisense oligonucleotide
  misc_feature (1)..(2): BNA scaffold modification
  misc_feature (21)..(22): BNA scaffold modification
gccgcugcccaaugccaucctg

SEQ ID NO: 3228 - RNA, 22 nt, Artificial Sequence
  Antisense oligonucleotide
  misc_feature (1)..(2): BNA scaffold modification
  misc_feature (14)..(14): BNA scaffold modification
  misc_feature (21)..(22): BNA scaffold modification
gccgcugcccaaugccaucctg

SEQ ID NO: 3229 - RNA, 22 nt, Artificial Sequence
  Antisense oligonucleotide
  misc_feature (1)..(1): BNA scaffold modification
  misc_feature (7)..(7): BNA scaffold modification
  misc_feature (14)..(14): BNA scaffold modification
  misc_feature (21)..(22): BNA scaffold modification
gccgcugcccaaugccaucctg

SEQ ID NO: 3230 - RNA, 22 nt, Artificial Sequence
  Antisense oligonucleotide
  misc_feature (1)..(1): BNA scaffold modification
  misc_feature (9)..(9): BNA scaffold modification
  misc_feature (15)..(15): BNA scaffold modification
  misc_feature (22)..(22): BNA scaffold modification
gccgcugcccaaugccauccug

SEQ ID NO: 3231 - RNA, 22 nt, Artificial Sequence
  Antisense oligonucleotide
  misc_feature (1)..(1): BNA scaffold modification
  misc_feature (22)..(22): BNA scaffold modification
tugccgcugcccaaugccaucc

SEQ ID NO: 3232 - RNA, 22 nt, Artificial Sequence
  Antisense oligonucleotide
  misc_feature (1)..(1): BNA scaffold modification
  misc_feature (6)..(6): BNA scaffold modification
  misc_feature (22)..(22): BNA scaffold modification
tugccgcugcccaaugccaucc

SEQ ID NO: 3233 - RNA, 22 nt, Artificial Sequence
  Antisense oligonucleotide
  misc_feature (1)..(1): BNA scaffold modification
  misc_feature (3)..(3): BNA scaffold modification
  misc_feature (22)..(22): BNA scaffold modification
tugccgcugcccaaugccaucc

SEQ ID NO: 3234 - RNA, 22 nt, Artificial Sequence
  Antisense oligonucleotide
  misc_feature (1)..(1): BNA scaffold modification
  misc_feature (9)..(9): BNA scaffold modification
  misc_feature (22)..(22): BNA scaffold modification
tugccgcugcccaaugccaucc

SEQ ID NO: 3235 - RNA, 22 nt, Artificial Sequence
  Antisense oligonucleotide
  misc_feature (1)..(1): BNA scaffold modification
  misc_feature (16)..(16): BNA scaffold modification
  misc_feature (22)..(22): BNA scaffold modification
tugccgcugcccaaugccaucc

SEQ ID NO: 3236 - RNA, 22 nt, Artificial Sequence
  Antisense oligonucleotide
  misc_feature (1)..(1): BNA scaffold modification
  misc_feature (18)..(18): BNA scaffold modification
  misc_feature (22)..(22): BNA scaffold modification
tugccgcugcccaaugccaucc

SEQ ID NO: 3237 - RNA, 22 nt, Artificial Sequence
  Antisense oligonucleotide
  misc_feature (1)..(1): BNA scaffold modification
  misc_feature (12)..(12): BNA scaffold modification
  misc_feature (22)..(22): BNA scaffold modification
tugccgcugcccaaugccaucc

SEQ ID NO: 3238 - RNA, 22 nt, Artificial Sequence
  Antisense oligonucleotide
  misc_feature (1)..(1): BNA scaffold modification
  misc_feature (7)..(7): BNA scaffold modification
  misc_feature (22)..(22): BNA scaffold modification
tugccgcugcccaaugccaucc

SEQ ID NO: 3239 - RNA, 22 nt, Artificial Sequence
  Antisense oligonucleotide
  misc_feature (1)..(1): BNA scaffold modification
  misc_feature (9)..(9): BNA scaffold modification
  misc_feature (16)..(16): BNA scaffold modification
  misc_feature (22)..(22): BNA scaffold modification
tugccgcugcccaaugccaucc

SEQ ID NO: 3240 - RNA, 22 nt, Artificial Sequence
  Antisense oligonucleotide
  misc_feature (1)..(1): BNA scaffold modification
  misc_feature (3)..(3): BNA scaffold modification
  misc_feature (9)..(9): BNA scaffold modification
  misc_feature (22)..(22): BNA scaffold modification
tugccgcugcccaaugccaucc

SEQ ID NO: 3241 - RNA, 22 nt, Artificial Sequence
  Antisense oligonucleotide
  misc_feature (1)..(1): BNA scaffold modification
  misc_feature (7)..(7): BNA scaffold modification
  misc_feature (18)..(18): BNA scaffold modification
  misc_feature (22)..(22): BNA scaffold modification
tugccgcugcccaaugccaucc

SEQ ID NO: 3242 - RNA, 22 nt, Artificial Sequence
  Antisense oligonucleotide
  misc_feature (1)..(1): BNA scaffold modification
  misc_feature (8)..(8): BNA scaffold modification
  misc_feature (18)..(18): BNA scaffold modification
  misc_feature (22)..(22): BNA scaffold modification
tugccgcugcccaaugccaucc

SEQ ID NO: 3243 - RNA, 22 nt, Artificial Sequence
  Antisense oligonucleotide
  misc_feature (1)..(1): BNA scaffold modification
  misc_feature (12)..(12): BNA scaffold modification
  misc_feature (18)..(18): BNA scaffold modification
  misc_feature (22)..(22): BNA scaffold modification
tugccgcugcccaaugccaucc

SEQ ID NO: 3244 - RNA, 22 nt, Artificial Sequence
  Antisense oligonucleotide
  misc_feature (1)..(1): BNA scaffold modification
  misc_feature (7)..(7): BNA scaffold modification
  misc_feature (18)..(18): BNA scaffold modification
  misc_feature (22)..(22): BNA scaffold modification
tugccgcugcccaaugccaucc

SEQ ID NO: 3245 - RNA, 22 nt, Artificial Sequence
  Antisense oligonucleotide
  misc_feature (1)..(2): BNA scaffold modification
  misc_feature (21)..(22): BNA scaffold modification
ttgccgcugcccaaugccaucc

SEQ ID NO: 3246 - RNA, 22 nt, Artificial Sequence
  Antisense oligonucleotide
  misc_feature (1)..(1): BNA scaffold modification
  misc_feature (12)..(12): BNA scaffold modification
  misc_feature (21)..(22): BNA scaffold modification
tugccgcugcccaaugccaucc

SEQ ID NO: 3247 - RNA, 22 nt, Artificial Sequence
  Antisense oligonucleotide
  misc_feature (1)..(1): BNA scaffold modification
  misc_feature (22)..(22): BNA scaffold modification
tgccgcugcccaaugccaucct

SEQ ID NO: 3248 - RNA, 22 nt, Artificial Sequence
  Antisense oligonucleotide
  misc_feature (1)..(2): BNA scaffold modification
  misc_feature (22)..(22): BNA scaffold modification
tgccgcugcccaaugccaucct

SEQ ID NO: 3249 - RNA, 22 nt, Artificial Sequence
  Antisense oligonucleotide
  misc_feature (1)..(1): BNA scaffold modification
  misc_feature (5)..(5): BNA scaffold modification
  misc_feature (22)..(22): BNA scaffold modification
tgccgcugcccaaugccaucct

SEQ ID NO: 3250 - RNA, 22 nt, Artificial Sequence
  Antisense oligonucleotide
  misc_feature (1)..(1): BNA scaffold modification
  misc_feature (8)..(8): BNA scaffold modification
  misc_feature (22)..(22): BNA scaffold modification
tgccgcugcccaaugccaucct

SEQ ID NO: 3251 - RNA, 22 nt, Artificial Sequence
  Antisense oligonucleotide
  misc_feature (1)..(1): BNA scaffold modification
  misc_feature (15)..(15): BNA scaffold modification
  misc_feature (22)..(22): BNA scaffold modification
tgccgcugcccaaugccaucct

SEQ ID NO: 3252 - RNA, 22 nt, Artificial Sequence
  Antisense oligonucleotide
  misc_feature (1)..(1): BNA scaffold modification
  misc_feature (20)..(20): BNA scaffold modification
  misc_feature (22)..(22): BNA scaffold modification
tgccgcugcccaaugccaucct

SEQ ID NO: 3253 - RNA, 22 nt, Artificial Sequence
  Antisense oligonucleotide
  misc_feature (1)..(1): BNA scaffold modification
  misc_feature (17)..(17): BNA scaffold modification
  misc_feature (22)..(22): BNA scaffold modification
tgccgcugcccaaugccaucct

SEQ ID NO: 3254 - RNA, 22 nt, Artificial Sequence
  Antisense oligonucleotide
  misc_feature (1)..(1): BNA scaffold modification
  misc_feature (11)..(11): BNA scaffold modification
  misc_feature (22)..(22): BNA scaffold modification
tgccgcugcccaaugccaucct

SEQ ID NO: 3255 - RNA, 22 nt, Artificial Sequence
  Antisense oligonucleotide
  misc_feature (1)..(1): BNA scaffold modification
  misc_feature (6)..(6): BNA scaffold modification
  misc_feature (22)..(22): BNA scaffold modification
tgccgcugcccaaugccaucct

SEQ ID NO: 3256 - RNA, 22 nt, Artificial Sequence
  Antisense oligonucleotide
  misc_feature (1)..(1): BNA scaffold modification
  misc_feature (8)..(8): BNA scaffold modification
  misc_feature (15)..(15): BNA scaffold modification
  misc_feature (22)..(22): BNA scaffold modification
tgccgcugcccaaugccaucct

SEQ ID NO: 3257 - RNA, 22 nt, Artificial Sequence
  Antisense oligonucleotide
  misc_feature (1)..(1): BNA scaffold modification
  misc_feature (5)..(5): BNA scaffold modification
  misc_feature (15)..(15): BNA scaffold modification
  misc_feature (22)..(22): BNA scaffold modification
tgccgcugcccaaugccaucct

SEQ ID NO: 3258 - RNA, 22 nt, Artificial Sequence
  Antisense oligonucleotide
  misc_feature (1)..(1): BNA scaffold modification
  misc_feature (11)..(11): BNA scaffold modification
  misc_feature (17)..(17): BNA scaffold modification
  misc_feature (22)..(22): BNA scaffold modification
tgccgcugcccaaugccaucct

SEQ ID NO: 3259 - RNA, 22 nt, Artificial Sequence
  Antisense oligonucleotide
  misc_feature (1)..(1): BNA scaffold modification
  misc_feature (6)..(6): BNA scaffold modification
  misc_feature (17)..(17): BNA scaffold modification
  misc_feature (22)..(22): BNA scaffold modification
tgccgcugcccaaugccaucct

SEQ ID NO: 3260 - RNA, 22 nt, Artificial Sequence
  Antisense oligonucleotide
  misc_feature (1)..(1): BNA scaffold modification
  misc_feature (6)..(6): BNA scaffold modification
  misc_feature (11)..(11): BNA scaffold modification
  misc_feature (17)..(17): BNA scaffold modification
  misc_feature (22)..(22): BNA scaffold modification
tgccgcugcccaaugccaucct

SEQ ID NO: 3261 - RNA, 22 nt, Artificial Sequence
  Antisense oligonucleotide
  misc_feature (1)..(2): BNA scaffold modification
  misc_feature (21)..(22): BNA scaffold modification
tgccgcugcccaaugccaucct

SEQ ID NO: 3262 - RNA, 22 nt, Artificial Sequence
  Antisense oligonucleotide
  misc_feature (1)..(2): BNA scaffold modification
  misc_feature (8)..(8): BNA scaffold modification
  misc_feature (15)..(15): BNA scaffold modification
  misc_feature (21)..(22): BNA scaffold modification
tgccgcugcccaaugccaucct

SEQ ID NO: 3263 - RNA, 20 nt, Artificial Sequence
  Antisense oligonucleotide
  misc_feature (1)..(1): BNA scaffold modification
  misc_feature (20)..(20): BNA scaffold modification
tuugccgcugcccaaugcca

SEQ ID NO: 3264 - RNA, 20 nt, Artificial Sequence
  Antisense oligonucleotide
  misc_feature (1)..(1): BNA scaffold modification
  misc_feature (4)..(4): BNA scaffold modification
  misc_feature (20)..(20): BNA scaffold modification
tuugccgcugcccaaugcca

SEQ ID NO: 3265 - RNA, 20 nt, Artificial Sequence
  Antisense oligonucleotide
  misc_feature (1)..(1): BNA scaffold modification
  misc_feature (7)..(7): BNA scaffold modification
  misc_feature (20)..(20): BNA scaffold modification
tuugccgcugcccaaugcca

SEQ ID NO: 3266 - RNA, 20 nt, Artificial Sequence
  Antisense oligonucleotide
  misc_feature (1)..(1): BNA scaffold modification
  misc_feature (10)..(10): BNA scaffold modification
  misc_feature (20)..(20): BNA scaffold modification
tuugccgcugcccaaugcca

SEQ ID NO: 3267 - RNA, 20 nt, Artificial Sequence
  Antisense oligonucleotide
  misc_feature (1)..(1): BNA scaffold modification
  misc_feature (17)..(17): BNA scaffold modification
  misc_feature (20)..(20): BNA scaffold modification
tuugccgcugcccaaugcca

SEQ ID NO: 3268 - RNA, 20 nt, Artificial Sequence
  Antisense oligonucleotide
  misc_feature (1)..(1): BNA scaffold modification
  misc_feature (8)..(8): BNA scaffold modification
  misc_feature (20)..(20): BNA scaffold modification
tuugccgcugcccaaugcca

SEQ ID NO: 3269 - RNA, 20 nt, Artificial Sequence
  Antisense oligonucleotide
  misc_feature (1)..(1): BNA scaffold modification
  misc_feature (13)..(13): BNA scaffold modification
  misc_feature (20)..(20): BNA scaffold modification
tuugccgcugcccaaugcca

SEQ ID NO: 3270 - RNA, 20 nt, Artificial Sequence
  Antisense oligonucleotide
  misc_feature (1)..(1): BNA scaffold modification
  misc_feature (19)..(20): BNA scaffold modification
tuugccgcugcccaaugcca

SEQ ID NO: 3271 - RNA, 20 nt, Artificial Sequence
  Antisense oligonucleotide
  misc_feature (1)..(1): BNA scaffold modification
  misc_feature (6)..(6): BNA scaffold modification
  misc_feature (20)..(20): BNA scaffold modification
tuugccgcugcccaaugcca

SEQ ID NO: 3272 - RNA, 20 nt, Artificial Sequence
  Antisense oligonucleotide
  misc_feature (1)..(1): BNA scaffold modification
  misc_feature (10)..(10): BNA scaffold modification
  misc_feature (17)..(17): BNA scaffold modification
  misc_feature (20)..(20): BNA scaffold modification
tuugccgcugcccaaugcca

SEQ ID NO: 3273 - RNA, 20 nt, Artificial Sequence
  Antisense oligonucleotide
  misc_feature (1)..(1): BNA scaffold modification
  misc_feature (4)..(4): BNA scaffold modification
  misc_feature (17)..(17): BNA scaffold modification
  misc_feature (20)..(20): BNA scaffold modification
tuugccgcugcccaaugcca

SEQ ID NO: 3274 - RNA, 20 nt, Artificial Sequence
  Antisense oligonucleotide
  misc_feature (1)..(1): BNA scaffold modification
  misc_feature (8)..(8): BNA scaffold modification
  misc_feature (13)..(13): BNA scaffold modification
  misc_feature (20)..(20): BNA scaffold modification
tuugccgcugcccaaugcca

SEQ ID NO: 3275 - RNA, 20 nt, Artificial Sequence
  Antisense oligonucleotide
  misc_feature (1)..(1): BNA scaffold modification
  misc_feature (6)..(6): BNA scaffold modification
  misc_feature (18)..(18): BNA scaffold modification
  misc_feature (20)..(20): BNA scaffold modification
tuugccgcugcccaaugcca

SEQ ID NO: 3276 - RNA, 20 nt, Artificial Sequence
  Antisense oligonucleotide
  misc_feature (1)..(2): BNA scaffold modification
  misc_feature (19)..(20): BNA scaffold modification
ttugccgcugcccaaugcca

SEQ ID NO: 3277 - RNA, 20 nt, Artificial Sequence
  Antisense oligonucleotide
  misc_feature (1)..(2): BNA scaffold modification
  misc_feature (10)..(10): BNA scaffold modification
  misc_feature (19)..(20): BNA scaffold modification
ttugccgcugcccaaugcca

SEQ ID NO: 3278 - RNA, 20 nt, Artificial Sequence
  Antisense oligonucleotide
  misc_feature (1)..(1): BNA scaffold modification
  misc_feature (20)..(20): BNA scaffold modification
tugccgcugcccaaugccat

SEQ ID NO: 3279 - RNA, 20 nt, Artificial Sequence
  Antisense oligonucleotide
  misc_feature (1)..(1): BNA scaffold modification
  misc_feature (3)..(3): BNA scaffold modification
  misc_feature (20)..(20): BNA scaffold modification
tugccgcugcccaaugccat

SEQ ID NO: 3280 - RNA, 20 nt, Artificial Sequence
  Antisense oligonucleotide
  misc_feature (1)..(1): BNA scaffold modification
  misc_feature (6)..(6): BNA scaffold modification
  misc_feature (20)..(20): BNA scaffold modification
tugccgcugcccaaugccat

SEQ ID NO: 3281 - RNA, 20 nt, Artificial Sequence
  Antisense oligonucleotide
  misc_feature (1)..(1): BNA scaffold modification
  misc_feature (9)..(9): BNA scaffold modification
  misc_feature (20)..(20): BNA scaffold modification
tugccgcugcccaaugccat

SEQ ID NO: 3282 - RNA, 20 nt, Artificial Sequence
  Antisense oligonucleotide
  misc_feature (1)..(1): BNA scaffold modification
  misc_feature (16)..(16): BNA scaffold modification
  misc_feature (20)..(20): BNA scaffold modification
tugccgcugcccaaugccat

SEQ ID NO: 3283 - RNA, 20 nt, Artificial Sequence
  Antisense oligonucleotide
  misc_feature (1)..(1): BNA scaffold modification
  misc_feature (7)..(7): BNA scaffold modification
  misc_feature (20)..(20): BNA scaffold modification
tugccgcugcccaaugccat

SEQ ID NO: 3284 - RNA, 20 nt, Artificial Sequence
  Antisense oligonucleotide
  misc_feature (1)..(1): BNA scaffold modification
  misc_feature (12)..(12): BNA scaffold modification
  misc_feature (20)..(20): BNA scaffold modification
tugccgcugcccaaugccat

SEQ ID NO: 3285 - RNA, 20 nt, Artificial Sequence
  Antisense oligonucleotide
  misc_feature (1)..(1): BNA scaffold modification
  misc_feature (18)..(18): BNA scaffold modification
  misc_feature (20)..(20): BNA scaffold modification
tugccgcugcccaaugccat

SEQ ID NO: 3286 - RNA, 20 nt, Artificial Sequence
  Antisense oligonucleotide
  misc_feature (1)..(1): BNA scaffold modification
  misc_feature (9)..(9): BNA scaffold modification
  misc_feature (16)..(16): BNA scaffold modification
  misc_feature (20)..(20): BNA scaffold modification
tugccgcugcccaaugccat

SEQ ID NO: 3287 - RNA, 20 nt, Artificial Sequence
  Antisense oligonucleotide
  misc_feature (1)..(1): BNA scaffold modification
  misc_feature (3)..(3): BNA scaffold modification
  misc_feature (9)..(9): BNA scaffold modification
  misc_feature (20)..(20): BNA scaffold modification
tugccgcugcccaaugccat

SEQ ID NO: 3288 - RNA, 20 nt, Artificial Sequence
  Antisense oligonucleotide
  misc_feature (1)..(1): BNA scaffold modification
  misc_feature (3)..(3): BNA scaffold modification
  misc_feature (16)..(16): BNA scaffold modification
  misc_feature (20)..(20): BNA scaffold modification
tugccgcugcccaaugccat

SEQ ID NO: 3289 - RNA, 20 nt, Artificial Sequence
  Antisense oligonucleotide
  misc_feature (1)..(1): BNA scaffold modification
  misc_feature (7)..(7): BNA scaffold modification
  misc_feature (12)..(12): BNA scaffold modification
  misc_feature (20)..(20): BNA scaffold modification
tugccgcugcccaaugccat

SEQ ID NO: 3290 - RNA, 20 nt, Artificial Sequence
  Antisense oligonucleotide
  misc_feature (1)..(1): BNA scaffold modification
  misc_feature (7)..(7): BNA scaffold modification
  misc_feature (18)..(18): BNA scaffold modification
  misc_feature (20)..(20): BNA scaffold modification
tugccgcugcccaaugccat

SEQ ID NO: 3291 - RNA, 20 nt, Artificial Sequence
  Antisense oligonucleotide
  misc_feature (1)..(1): BNA scaffold modification
  misc_feature (7)..(7): BNA scaffold modification
  misc_feature (12)..(12): BNA scaffold modification
  misc_feature (18)..(18): BNA scaffold modification
  misc_feature (20)..(20): BNA scaffold modification
tugccgcugcccaaugccat

SEQ ID NO: 3292 - RNA, 20 nt, Artificial Sequence
  Antisense oligonucleotide
  misc_feature (1)..(2): BNA scaffold modification
  misc_feature (19)..(20): BNA scaffold modification
ttgccgcugcccaaugccat

SEQ ID NO: 3293 - RNA, 20 nt, Artificial Sequence
  Antisense oligonucleotide
  misc_feature (1)..(2): BNA scaffold modification
  misc_feature (9)..(9): BNA scaffold modification
  misc_feature (16)..(16): BNA scaffold modification
  misc_feature (19)..(20): BNA scaffold modification
tugccgcugcccaaugccat

SEQ ID NO: 3294 - RNA, 20 nt, Artificial Sequence
  Antisense oligonucleotide
  misc_feature (1)..(1): BNA scaffold modification
  misc_feature (20)..(20): BNA scaffold modification
tgccgcugcccaaugccauc

SEQ ID NO: 3295 - RNA, 20 nt, Artificial Sequence
  Antisense oligonucleotide
  misc_feature (1)..(1): BNA scaffold modification
  misc_feature (17)..(17): BNA scaffold modification
  misc_feature (20)..(20): BNA scaffold modification
tgccgcugcccaaugccauc

SEQ ID NO: 3296 - RNA, 20 nt, Artificial Sequence
  Antisense oligonucleotide
  misc_feature (1)..(1): BNA scaffold modification
  misc_feature (11)..(11): BNA scaffold modification
  misc_feature (20)..(20): BNA scaffold modification
tgccgcugcccaaugccauc

SEQ ID NO: 3297 - RNA, 20 nt, Artificial Sequence
  Antisense oligonucleotide
  misc_feature (1)..(1): BNA scaffold modification
  misc_feature (6)..(6): BNA scaffold modification
  misc_feature (20)..(20): BNA scaffold modification
tgccgcugcccaaugccauc

SEQ ID NO: 3298 - RNA, 20 nt, Artificial Sequence
  Antisense oligonucleotide
  misc_feature (1)..(2): BNA scaffold modification
  misc_feature (20)..(20): BNA scaffold modification
tgccgcugcccaaugccauc

SEQ ID NO: 3299 - RNA, 20 nt, Artificial Sequence
  Antisense oligonucleotide
  misc_feature (1)..(1): BNA scaffold modification
  misc_feature (5)..(5): BNA scaffold modification
  misc_feature (20)..(20): BNA scaffold modification
tgccgcugcccaaugccauc

SEQ ID NO: 3300 - RNA, 20 nt, Artificial Sequence
  Antisense oligonucleotide
  misc_feature (1)..(1): BNA scaffold modification
  misc_feature (8)..(8): BNA scaffold modification
  misc_feature (20)..(20): BNA scaffold modification
tgccgcugcccaaugccauc

SEQ ID NO: 3301 - RNA, 20 nt, Artificial Sequence
  Antisense oligonucleotide
  misc_feature (1)..(1): BNA scaffold modification
  misc_feature (15)..(15): BNA scaffold modification
  misc_feature (20)..(20): BNA scaffold modification
tgccgcugcccaaugccauc

SEQ ID NO: 3302 - RNA, 20 nt, Artificial Sequence
  Antisense oligonucleotide
  misc_feature (1)..(1): BNA scaffold modification
  misc_feature (8)..(8): BNA scaffold modification
  misc_feature (15)..(15): BNA scaffold modification
  misc_feature (20)..(20): BNA scaffold modification
tgccgcugcccaaugccauc

SEQ ID NO: 3303 - RNA, 20 nt, Artificial Sequence
  Antisense oligonucleotide
  misc_feature (1)..(1): BNA scaffold modification
  misc_feature (5)..(5): BNA scaffold modification
  misc_feature (15)..(15): BNA scaffold modification
  misc_feature (20)..(20): BNA scaffold modification
tgccgcugcccaaugccauc

SEQ ID NO: 3304 - RNA, 20 nt, Artificial Sequence
  Antisense oligonucleotide
  misc_feature (1)..(1): BNA scaffold modification
  misc_feature (11)..(11): BNA scaffold modification
  misc_feature (17)..(17): BNA scaffold modification
  misc_feature (20)..(20): BNA scaffold modification
tgccgcugcccaaugccauc

SEQ ID NO: 3305 - RNA, 20 nt, Artificial Sequence
  Antisense oligonucleotide
  misc_feature (1)..(1): BNA scaffold modification
  misc_feature (6)..(6): BNA scaffold modification
  misc_feature (11)..(11): BNA scaffold modification
  misc_feature (17)..(17): BNA scaffold modification
  misc_feature (20)..(20): BNA scaffold modification
tgccgcugcccaaugccauc

SEQ ID NO: 3306 - RNA, 20 nt, Artificial Sequence
  Antisense oligonucleotide
  misc_feature (1)..(2): BNA scaffold modification
  misc_feature (8)..(8): BNA scaffold modification
  misc_feature (20)..(20): BNA scaffold modification
tgccgcugcccaaugccauc

SEQ ID NO: 3307 - RNA, 20 nt, Artificial Sequence
  Antisense oligonucleotide
  misc_feature (1)..(2): BNA scaffold modification
  misc_feature (19)..(20): BNA scaffold modification
tgccgcugcccaaugccatc

SEQ ID NO: 3308 - RNA, 20 nt, Artificial Sequence
  Antisense oligonucleotide
  misc_feature (1)..(2): BNA scaffold modification
  misc_feature (11)..(11): BNA scaffold modification
  misc_feature (15)..(15): BNA scaffold modification
  misc_feature (19)..(20): BNA scaffold modification
tgccgcugcccaaugccatc

SEQ ID NO: 3309 - RNA, 20 nt, Artificial Sequence
  Antisense oligonucleotide
  misc_feature (1)..(1): BNA scaffold modification
  misc_feature (20)..(20): BNA scaffold modification
gccgcugcccaaugccaucc

SEQ ID NO: 3310 - RNA, 20 nt, Artificial Sequence
  Antisense oligonucleotide
  misc_feature (1)..(1): BNA scaffold modification
  misc_feature (4)..(4): BNA scaffold modification
  misc_feature (20)..(20): BNA scaffold modification
gccgcugcccaaugccaucc

SEQ ID NO: 3311 - RNA, 20 nt, Artificial Sequence
  Antisense oligonucleotide
  misc_feature (1)..(1): BNA scaffold modification
  misc_feature (7)..(7): BNA scaffold modification
  misc_feature (20)..(20): BNA scaffold modification
gccgcugcccaaugccaucc

SEQ ID NO: 3312 - RNA, 20 nt, Artificial Sequence
  Antisense oligonucleotide
  misc_feature (1)..(1): BNA scaffold modification
  misc_feature (14)..(14): BNA scaffold modification
  misc_feature (20)..(20): BNA scaffold modification
gccgcugcccaaugccaucc

SEQ ID NO: 3313 - RNA, 20 nt, Artificial Sequence
  Antisense oligonucleotide
  misc_feature (1)..(1): BNA scaffold modification
  misc_feature (16)..(16): BNA scaffold modification
  misc_feature (20)..(20): BNA scaffold modification
gccgcugcccaaugccaucc

SEQ ID NO: 3314 - RNA, 20 nt, Artificial Sequence
  Antisense oligonucleotide
  misc_feature (1)..(1): BNA scaffold modification
  misc_feature (10)..(10): BNA scaffold modification
  misc_feature (20)..(20): BNA scaffold modification
gccgcugcccaaugccaucc

SEQ ID NO: 3315 - RNA, 20 nt, Artificial Sequence
  Antisense oligonucleotide
  misc_feature (1)..(1): BNA scaffold modification
  misc_feature (5)..(5): BNA scaffold modification
  misc_feature (20)..(20): BNA scaffold modification
gccgcugcccaaugccaucc

SEQ ID NO: 3316 - RNA, 20 nt, Artificial Sequence
  Antisense oligonucleotide
  misc_feature (1)..(1): BNA scaffold modification
  misc_feature (4)..(4): BNA scaffold modification
  misc_feature (14)..(14): BNA scaffold modification
  misc_feature (20)..(20): BNA scaffold modification
gccgcugcccaaugccaucc

SEQ ID NO: 3317 - RNA, 20 nt, Artificial Sequence
  Antisense oligonucleotide
  misc_feature (1)..(1): BNA scaffold modification
  misc_feature (7)..(7): BNA scaffold modification
  misc_feature (14)..(14): BNA scaffold modification
  misc_feature (20)..(20): BNA scaffold modification
gccgcugcccaaugccaucc

SEQ ID NO: 3318 - RNA, 20 nt, Artificial Sequence
  Antisense oligonucleotide
  misc_feature (1)..(1): BNA scaffold modification
  misc_feature (10)..(10): BNA scaffold modification
  misc_feature (16)..(16): BNA scaffold modification
  misc_feature (20)..(20): BNA scaffold modification
gccgcugcccaaugccaucc

SEQ ID NO: 3319 - RNA, 20 nt, Artificial Sequence
  Antisense oligonucleotide
  misc_feature (1)..(1): BNA scaffold modification
  misc_feature (5)..(5): BNA scaffold modification
  misc_feature (10)..(10): BNA scaffold modification
  misc_feature (16)..(16): BNA scaffold modification
  misc_feature (20)..(20): BNA scaffold modification
gccgcugcccaaugccaucc

SEQ ID NO: 3320 - RNA, 20 nt, Artificial Sequence
  Antisense oligonucleotide
  misc_feature (1)..(2): BNA scaffold modification
  misc_feature (19)..(20): BNA scaffold modification
gccgcugcccaaugccaucc

SEQ ID NO: 3321 - RNA, 20 nt, Artificial Sequence
  Antisense oligonucleotide
  misc_feature (1)..(2): BNA scaffold modification
  misc_feature (10)..(10): BNA scaffold modification
  misc_feature (19)..(20): BNA scaffold modification
gccgcugcccaaugccaucc

SEQ ID NO: 3322 - RNA, 20 nt, Artificial Sequence
  Antisense oligonucleotide
  misc_feature (1)..(1): BNA scaffold modification
  misc_feature (5)..(5): BNA scaffold modification
  misc_feature (10)..(10): BNA scaffold modification
  misc_feature (16)..(16): BNA scaffold modification
  misc_feature (20)..(20): BNA scaffold modification
gccgcugcccaaugccaucc

SEQ ID NO: 3323 - RNA, 20 nt, Artificial Sequence
  Antisense oligonucleotide
  misc_feature (1)..(1): BNA scaffold modification
  misc_feature (4)..(4): BNA scaffold modification
  misc_feature (7)..(7): BNA scaffold modification
  misc_feature (14)..(14): BNA scaffold modification
  misc_feature (20)..(20): BNA scaffold modification
gccgcugcccaaugccaucc

SEQ ID NO: 3324 - RNA, 20 nt, Artificial Sequence
  Antisense oligonucleotide
  misc_feature (1)..(1): BNA scaffold modification
  misc_feature (20)..(20): BNA scaffold modification
ccgcugcccaaugccaucct

SEQ ID NO: 3325 - RNA, 20 nt, Artificial Sequence
  Antisense oligonucleotide
  misc_feature (1)..(1): BNA scaffold modification
  misc_feature (3)..(3): BNA scaffold modification
  misc_feature (20)..(20): BNA scaffold modification
ccgcugcccaaugccaucct

SEQ ID NO: 3326 - RNA, 20 nt, Artificial Sequence
  Antisense oligonucleotide
  misc_feature (1)..(1): BNA scaffold modification
  misc_feature (6)..(6): BNA scaffold modification
  misc_feature (20)..(20): BNA scaffold modification
ccgcugcccaaugccaucct

SEQ ID NO: 3327 - RNA, 20 nt, Artificial Sequence
  Antisense oligonucleotide
  misc_feature (1)..(1): BNA scaffold modification
  misc_feature (13)..(13): BNA scaffold modification
  misc_feature (20)..(20): BNA scaffold modification
ccgcugcccaaugccaucct

SEQ ID NO: 3328 - RNA, 20 nt, Artificial Sequence
  Antisense oligonucleotide
  misc_feature (1)..(1): BNA scaffold modification
  misc_feature (18)..(18): BNA scaffold modification
  misc_feature (20)..(20): BNA scaffold modification
ccgcugcccaaugccaucct

SEQ ID NO: 3329 - RNA, 20 nt, Artificial Sequence
  Antisense oligonucleotide
  misc_feature (1)..(1): BNA scaffold modification
  misc_feature (15)..(15): BNA scaffold modification
  misc_feature (20)..(20): BNA scaffold modification
ccgcugcccaaugccaucct

SEQ ID NO: 3330 - RNA, 20 nt, Artificial Sequence
  Antisense oligonucleotide
  misc_feature (1)..(1): BNA scaffold modification
  misc_feature (4)..(4): BNA scaffold modification
  misc_feature (9)..(9): BNA scaffold modification
  misc_feature (20)..(20): BNA scaffold modification
ccgcugcccaaugccaucct

SEQ ID NO: 3331 - RNA, 20 nt, Artificial Sequence
  Antisense oligonucleotide
  misc_feature (1)..(1): BNA scaffold modification
  misc_feature (6)..(6): BNA scaffold modification
  misc_feature (13)..(13): BNA scaffold modification
  misc_feature (20)..(20): BNA scaffold modification
ccgcugcccaaugccaucct

SEQ ID NO: 3332 - RNA, 20 nt, Artificial Sequence
  Antisense oligonucleotide
  misc_feature (1)..(1): BNA scaffold modification
  misc_feature (9)..(9): BNA scaffold modification
  misc_feature (15)..(15): BNA scaffold modification
  misc_feature (20)..(20): BNA scaffold modification
ccgcugcccaaugccaucct

SEQ ID NO: 3333 - RNA, 20 nt, Artificial Sequence
  Antisense oligonucleotide
  misc_feature (1)..(1): BNA scaffold modification
  misc_feature (4)..(4): BNA scaffold modification
  misc_feature (9)..(9): BNA scaffold modification
  misc_feature (20)..(20): BNA scaffold modification
ccgcugcccaaugccaucct

SEQ ID NO: 3334 - RNA, 20 nt, Artificial Sequence
  Antisense oligonucleotide
  misc_feature (1)..(1): BNA scaffold modification
  misc_feature (4)..(4): BNA scaffold modification
  misc_feature (9)..(9): BNA scaffold modification
  misc_feature (15)..(15): BNA scaffold modification
  misc_feature (20)..(20): BNA scaffold modification
ccgcugcccaaugccaucct

SEQ ID NO: 3335 - RNA, 20 nt, Artificial Sequence
  Antisense oligonucleotide
  misc_feature (1)..(2): BNA scaffold modification
  misc_feature (19)..(20): BNA scaffold modification
ccgcugcccaaugccaucct

SEQ ID NO: 3336 - RNA, 20 nt, Artificial Sequence
  Antisense oligonucleotide
  misc_feature (1)..(2): BNA scaffold modification
  misc_feature (9)..(9): BNA scaffold modification
  misc_feature (19)..(20): BNA scaffold modification
ccgcugcccaaugccaucct

SEQ ID NO: 3337 - RNA, 20 nt, Artificial Sequence
  Antisense oligonucleotide
  misc_feature (1)..(2): BNA scaffold modification
  misc_feature (9)..(9): BNA scaffold modification
  misc_feature (15)..(15): BNA scaffold modification
  misc_feature (19)..(20): BNA scaffold modification
ccgcugcccaaugccaucct

SEQ ID NO: 3338 - RNA, 20 nt, Artificial Sequence
  Antisense oligonucleotide
  misc_feature (1)..(1): BNA scaffold modification
  misc_feature (20)..(20): BNA scaffold modification
cgcugcccaaugccauccug

SEQ ID NO: 3339 - RNA, 20 nt, Artificial Sequence
  Antisense oligonucleotide
  misc_feature (1)..(2): BNA scaffold modification
  misc_feature (20)..(20): BNA scaffold modification
cgcugcccaaugccauccug

SEQ ID NO: 3340 - RNA, 20 nt, Artificial Sequence
  Antisense oligonucleotide
  misc_feature (1)..(1): BNA scaffold modification
  misc_feature (5)..(5): BNA scaffold modification
  misc_feature (20)..(20): BNA scaffold modification
cgcugcccaaugccauccug

SEQ ID NO: 3341 - RNA, 20 nt, Artificial Sequence
  Antisense oligonucleotide
  misc_feature (1)..(1): BNA scaffold modification
  misc_feature (12)..(12): BNA scaffold modification
  misc_feature (20)..(20): BNA scaffold modification
cgcugcccaaugccauccug

SEQ ID NO: 3342 - RNA, 20 nt, Artificial Sequence
  Antisense oligonucleotide
  misc_feature (1)..(1): BNA scaffold modification
  misc_feature (18)..(18): BNA scaffold modification
  misc_feature (20)..(20): BNA scaffold modification
cgcugcccaaugccauccug

SEQ ID NO: 3343 - RNA, 20 nt, Artificial Sequence
  Antisense oligonucleotide
  misc_feature (1)..(1): BNA scaffold modification
  misc_feature (14)..(14): BNA scaffold modification
  misc_feature (20)..(20): BNA scaffold modification
cgcugcccaaugccauccug

SEQ ID NO: 3344 - RNA, 20 nt, Artificial Sequence
  Antisense oligonucleotide
  misc_feature (1)..(1): BNA scaffold modification
  misc_feature (8)..(8): BNA scaffold modification
  misc_feature (20)..(20): BNA scaffold modification
cgcugcccaaugccauccug

SEQ ID NO: 3345 - RNA, 20 nt, Artificial Sequence
  Antisense oligonucleotide
  misc_feature (1)..(1): BNA scaffold modification
  misc_feature (3)..(3): BNA scaffold modification
  misc_feature (20)..(20): BNA scaffold modification
cgcugcccaaugccauccug

SEQ ID NO: 3346 - RNA, 20 nt, Artificial Sequence
  Antisense oligonucleotide
  misc_feature (1)..(1): BNA scaffold modification
  misc_feature (5)..(5): BNA scaffold modification
  misc_feature (12)..(12): BNA scaffold modification
  misc_feature (20)..(20): BNA scaffold modification
cgcugcccaaugccauccug

SEQ ID NO: 3347 - RNA, 20 nt, Artificial Sequence
  Antisense oligonucleotide
  misc_feature (1)..(1): BNA scaffold modification
  misc_feature (8)..(8): BNA scaffold modification
  misc_feature (14)..(14): BNA scaffold modification
  misc_feature (20)..(20): BNA scaffold modification
cgcugcccaaugccauccug

SEQ ID NO: 3348 - RNA, 20 nt, Artificial Sequence
  Antisense oligonucleotide
  misc_feature (1)..(1): BNA scaffold modification
  misc_feature (3)..(3): BNA scaffold modification
  misc_feature (18)..(18): BNA scaffold modification
  misc_feature (20)..(20): BNA scaffold modification
cgcugcccaaugccauccug

SEQ ID NO: 3349 - RNA, 20 nt, Artificial Sequence
  Antisense oligonucleotide
  misc_feature (1)..(2): BNA scaffold modification
  misc_feature (19)..(20): BNA scaffold modification
cgcugcccaaugccaucctg

SEQ ID NO: 3350 - RNA, 20 nt, Artificial Sequence
  Antisense oligonucleotide
  misc_feature (1)..(2): BNA scaffold modification
  misc_feature (12)..(12): BNA scaffold modification
  misc_feature (19)..(20): BNA scaffold modification
cgcugcccaaugccaucctg

SEQ ID NO: 3351 - RNA, 20 nt, Artificial Sequence
  Antisense oligonucleotide
  misc_feature (1)..(2): BNA scaffold modification
  misc_feature (5)..(5): BNA scaffold modification
  misc_feature (12)..(12): BNA scaffold modification
  misc_feature (19)..(20): BNA scaffold modification
cgcugcccaaugccaucctg

SEQ ID NO: 3352 - RNA, 18 nt, Artificial Sequence
  Antisense oligonucleotide
  misc_feature (1)..(1): BNA scaffold modification
  misc_feature (18)..(18): BNA scaffold modification
tuugccgcugcccaaugc

SEQ ID NO: 3353 - RNA, 18 nt, Artificial Sequence
  Antisense oligonucleotide
  misc_feature (1)..(1): BNA scaffold modification
  misc_feature (4)..(4): BNA scaffold modification
  misc_feature (18)..(18): BNA scaffold modification
tuugccgcugcccaaugc

SEQ ID NO: 3354 - RNA, 18 nt, Artificial Sequence
  Antisense oligonucleotide
  misc_feature (1)..(1): BNA scaffold modification
  misc_feature (7)..(7): BNA scaffold modification
  misc_feature (18)..(18): BNA scaffold modification
tuugccgcugcccaaugc

SEQ ID NO: 3355 - RNA, 18 nt, Artificial Sequence
  Antisense oligonucleotide
  misc_feature (1)..(1): BNA scaffold modification
  misc_feature (10)..(10): BNA scaffold modification
  misc_feature (18)..(18): BNA scaffold modification
tuugccgcugcccaaugc

SEQ ID NO: 3356 - RNA, 18 nt, Artificial Sequence
  Antisense oligonucleotide
  misc_feature (1)..(1): BNA scaffold modification
  misc_feature (17)..(18): BNA scaffold modification
tuugccgcugcccaaugc

SEQ ID NO: 3357 - RNA, 18 nt, Artificial Sequence
  Antisense oligonucleotide
  misc_feature (1)..(1): BNA scaffold modification
  misc_feature (13)..(13): BNA scaffold modification
  misc_feature (18)..(18): BNA scaffold modification
tuugccgcugcccaaugc

SEQ ID NO: 3358 - RNA, 18 nt, Artificial Sequence
  Antisense oligonucleotide
  misc_feature (1)..(1): BNA scaffold modification
  misc_feature (8)..(8): BNA scaffold modification
  misc_feature (18)..(18): BNA scaffold modification
tuugccgcugcccaaugc

SEQ ID NO: 3359 - RNA, 18 nt, Artificial Sequence
  Antisense oligonucleotide
  misc_feature (1)..(1): BNA scaffold modification
  misc_feature (11)..(11): BNA scaffold modification
  misc_feature (18)..(18): BNA scaffold modification
tuugccgcugcccaaugc

SEQ ID NO: 3360 - RNA, 18 nt, Artificial Sequence
  Antisense oligonucleotide
  misc_feature (1)..(1): BNA scaffold modification
  misc_feature (6)..(6): BNA scaffold modification
  misc_feature (18)..(18): BNA scaffold modification
tuugccgcugcccaaugc

SEQ ID NO: 3361 - RNA, 18 nt, Artificial Sequence
  Antisense oligonucleotide
  misc_feature (1)..(1): BNA scaffold modification
  misc_feature (4)..(4): BNA scaffold modification
  misc_feature (10)..(10): BNA scaffold modification
  misc_feature (18)..(18): BNA scaffold modification
tuugccgcugcccaaugc

SEQ ID NO: 3362 - RNA, 18 nt, Artificial Sequence
  Antisense oligonucleotide
  misc_feature (1)..(1): BNA scaffold modification
  misc_feature (7)..(7): BNA scaffold modification
  misc_feature (17)..(18): BNA scaffold modification
tuugccgcugcccaaugc

SEQ ID NO: 3363 - RNA, 18 nt, Artificial Sequence
  Antisense oligonucleotide
  misc_feature (1)..(1): BNA scaffold modification
  misc_feature (8)..(8): BNA scaffold modification
  misc_feature (13)..(13): BNA scaffold modification
  misc_feature (18)..(18): BNA scaffold modification
tuugccgcugcccaaugc

SEQ ID NO: 3364 - RNA, 18 nt, Artificial Sequence
  Antisense oligonucleotide
  misc_feature (1)..(1): BNA scaffold modification
  misc_feature (5)..(5): BNA scaffold modification
  misc_feature (11)..(11): BNA scaffold modification
  misc_feature (18)..(18): BNA scaffold modification
tuugccgcugcccaaugc

SEQ ID NO: 3365 - RNA, 18 nt, Artificial Sequence
  Antisense oligonucleotide
  misc_feature (1)..(2): BNA scaffold modification
  misc_feature (17)..(18): BNA scaffold modification
ttugccgcugcccaaugc

SEQ ID NO: 3366 - RNA, 18 nt, Artificial Sequence
  Antisense oligonucleotide
  misc_feature (1)..(2): BNA scaffold modification
  misc_feature (10)..(10): BNA scaffold modification
  misc_feature (17)..(18): BNA scaffold modification
ttugccgcugcccaaugc

SEQ ID NO: 3367 - RNA, 18 nt, Artificial Sequence
  Antisense oligonucleotide
  misc_feature (1)..(1): BNA scaffold modification
  misc_feature (18)..(18): BNA scaffold modification
tugccgcugcccaaugcc

SEQ ID NO: 3368 - RNA, 18 nt, Artificial Sequence
  Antisense oligonucleotide
  misc_feature (1)..(1): BNA scaffold modification
  misc_feature (16)..(16): BNA scaffold modification
  misc_feature (18)..(18): BNA scaffold modification
tugccgcugcccaaugcc

SEQ ID NO: 3369 - RNA, 18 nt, Artificial Sequence
  Antisense oligonucleotide
  misc_feature (1)..(1): BNA scaffold modification
  misc_feature (9)..(9): BNA scaffold modification
  misc_feature (18)..(18): BNA scaffold modification
tugccgcugcccaaugcc

SEQ ID NO: 3370 - RNA, 18 nt, Artificial Sequence
  Antisense oligonucleotide
  misc_feature (1)..(1): BNA scaffold modification
  misc_feature (6)..(6): BNA scaffold modification
  misc_feature (18)..(18): BNA scaffold modification
tugccgcugcccaaugcc

SEQ ID NO: 3371 - RNA, 18 nt, Artificial Sequence
  Antisense oligonucleotide
  misc_feature (1)..(1): BNA scaffold modification
  misc_feature (3)..(3): BNA scaffold modification
  misc_feature (18)..(18): BNA scaffold modification
tugccgcugcccaaugcc

SEQ ID NO: 3372 - RNA, 18 nt, Artificial Sequence
  Antisense oligonucleotide
  misc_feature (1)..(1): BNA scaffold modification
  misc_feature (12)..(12): BNA scaffold modification
  misc_feature (18)..(18): BNA scaffold modification
tugccgcugcccaaugcc

SEQ ID NO: 3373 - RNA, 18 nt, Artificial Sequence
  Antisense oligonucleotide
  misc_feature (1)..(1): BNA scaffold modification
  misc_feature (7)..(7): BNA scaffold modification
  misc_feature (18)..(18): BNA scaffold modification
tugccgcugcccaaugcc

SEQ ID NO: 3374 - RNA, 18 nt, Artificial Sequence
  Antisense oligonucleotide
  misc_feature (1)..(1): BNA scaffold modification
  misc_feature (5)..(5): BNA scaffold modification
  misc_feature (18)..(18): BNA scaffold modification
tugccgcugcccaaugcc

SEQ ID NO: 3375 - RNA, 18 nt, Artificial Sequence
  Antisense oligonucleotide
  misc_feature (1)..(1): BNA scaffold modification
  misc_feature (9)..(9): BNA scaffold modification
  misc_feature (16)..(16): BNA scaffold modification
  misc_feature (18)..(18): BNA scaffold modification
tugccgcugcccaaugcc

SEQ ID NO: 3376 - RNA, 18 nt, Artificial Sequence
  Antisense oligonucleotide
  misc_feature (1)..(1): BNA scaffold modification
  misc_feature (3)..(3): BNA scaffold modification
  misc_feature (9)..(9): BNA scaffold modification
  misc_feature (18)..(18): BNA scaffold modification
tugccgcugcccaaugcc

SEQ ID NO: 3377 - RNA, 18 nt, Artificial Sequence
  Antisense oligonucleotide
  misc_feature (1)..(1): BNA scaffold modification
  misc_feature (6)..(6): BNA scaffold modification
  misc_feature (16)..(16): BNA scaffold modification
  misc_feature (18)..(18): BNA scaffold modification
tugccgcugcccaaugcc

SEQ ID NO: 3378 - RNA, 18 nt, Artificial Sequence
  Antisense oligonucleotide
  misc_feature (1)..(1): BNA scaffold modification
  misc_feature (7)..(7): BNA scaffold modification
  misc_feature (12)..(12): BNA scaffold modification
  misc_feature (18)..(18): BNA scaffold modification
tugccgcugcccaaugcc

SEQ ID NO: 3379 - RNA, 18 nt, Artificial Sequence
  Antisense oligonucleotide
  misc_feature (1)..(1): BNA scaffold modification
  misc_feature (4)..(4): BNA scaffold modification
  misc_feature (10)..(10): BNA scaffold modification
  misc_feature (17)..(18): BNA scaffold modification
tugccgcugcccaaugcc

SEQ ID NO: 3380 - RNA, 18 nt, Artificial Sequence
  Antisense oligonucleotide
  misc_feature (1)..(2): BNA scaffold modification
  misc_feature (17)..(18): BNA scaffold modification
ttgccgcugcccaaugcc

SEQ ID NO: 3381 - RNA, 18 nt, Artificial Sequence
  Antisense oligonucleotide
  misc_feature (1)..(2): BNA scaffold modification
  misc_feature (9)..(9): BNA scaffold modification
  misc_feature (17)..(18): BNA scaffold modification
ttgccgcugcccaaugcc

SEQ ID NO: 3382 - RNA, 18 nt, Artificial Sequence
  Antisense oligonucleotide
  misc_feature (1)..(1): BNA scaffold modification
  misc_feature (18)..(18): BNA scaffold modification
tgccgcugcccaaugcca

SEQ ID NO: 3383 - RNA, 18 nt, Artificial Sequence
  Antisense oligonucleotide
  misc_feature (1)..(2): BNA scaffold modification
  misc_feature (18)..(18): BNA scaffold modification
tgccgcugcccaaugcca

SEQ ID NO: 3384 - RNA, 18 nt, Artificial Sequence
  Antisense oligonucleotide
  misc_feature (1)..(1): BNA scaffold modification
  misc_feature (5)..(5): BNA scaffold modification
  misc_feature (18)..(18): BNA scaffold modification
tgccgcugcccaaugcca

SEQ ID NO: 3385 - RNA, 18 nt, Artificial Sequence
  Antisense oligonucleotide
  misc_feature (1)..(1): BNA scaffold modification
  misc_feature (8)..(8): BNA scaffold modification
  misc_feature (18)..(18): BNA scaffold modification
tgccgcugcccaaugcca

SEQ ID NO: 3386 - RNA, 18 nt, Artificial Sequence
  Antisense oligonucleotide
  misc_feature (1)..(1): BNA scaffold modification
  misc_feature (15)..(15): BNA scaffold modification
  misc_feature (18)..(18): BNA scaffold modification
tgccgcugcccaaugcca

SEQ ID NO: 3387 - RNA, 18 nt, Artificial Sequence
  Antisense oligonucleotide
  misc_feature (1)..(1): BNA scaffold modification
  misc_feature (8)..(8): BNA scaffold modification
  misc_feature (15)..(15): BNA scaffold modification
  misc_feature (18)..(18): BNA scaffold modification
tgccgcugcccaaugcca

SEQ ID NO: 3388 - RNA, 18 nt, Artificial Sequence
  Antisense oligonucleotide
  misc_feature (1)..(1): BNA scaffold modification
  misc_feature (5)..(5): BNA scaffold modification
  misc_feature (15)..(15): BNA scaffold modification
  misc_feature (18)..(18): BNA scaffold modification
tgccgcugcccaaugcca

SEQ ID NO: 3389 - RNA, 18 nt, Artificial Sequence
  Antisense oligonucleotide
  misc_feature (1)..(2): BNA scaffold modification
  misc_feature (15)..(15): BNA scaffold modification
  misc_feature (18)..(18): BNA scaffold modification
tgccgcugcccaaugcca

SEQ ID NO: 3390 - RNA, 18 nt, Artificial Sequence
  Antisense oligonucleotide
  misc_feature (1)..(1): BNA scaffold modification
  misc_feature (11)..(11): BNA scaffold modification
  misc_feature (18)..(18): BNA scaffold modification
tgccgcugcccaaugcca

SEQ ID NO: 3391 - RNA, 18 nt, Artificial Sequence
  Antisense oligonucleotide
  misc_feature (1)..(1): BNA scaffold modification
  misc_feature (6)..(6): BNA scaffold modification
  misc_feature (18)..(18): BNA scaffold modification
tgccgcugcccaaugcca

SEQ ID NO: 3392 - RNA, 18 nt, Artificial Sequence
  Antisense oligonucleotide
  misc_feature (1)..(1): BNA scaffold modification
  misc_feature (6)..(6): BNA scaffold modification
  misc_feature (11)..(11): BNA scaffold modification
  misc_feature (18)..(18): BNA scaffold modification
tgccgcugcccaaugcca

SEQ ID NO: 3393 - RNA, 18 nt, Artificial Sequence
  Antisense oligonucleotide
  misc_feature (1)..(2): BNA scaffold modification
  misc_feature (8)..(8): BNA scaffold modification
  misc_feature (15)..(15): BNA scaffold modification
  misc_feature (18)..(18): BNA scaffold modification
tgccgcugcccaaugcca

SEQ ID NO: 3394 - RNA, 18 nt, Artificial Sequence
  Antisense oligonucleotide
  misc_feature (1)..(2): BNA scaffold modification
  misc_feature (17)..(18): BNA scaffold modification
tgccgcugcccaaugcca

SEQ ID NO: 3395 - RNA, 18 nt, Artificial Sequence
  Antisense oligonucleotide
  misc_feature (1)..(2): BNA scaffold modification
  misc_feature (8)..(8): BNA scaffold modification
  misc_feature (17)..(18): BNA scaffold modification
tgccgcugcccaaugcca

SEQ ID NO: 3396 - RNA, 18 nt, Artificial Sequence
  Antisense oligonucleotide
  misc_feature (1)..(1): BNA scaffold modification
  misc_feature (18)..(18): BNA scaffold modification
gccgcugcccaaugccat

SEQ ID NO: 3397 - RNA, 18 nt, Artificial Sequence
  Antisense oligonucleotide
  misc_feature (1)..(1): BNA scaffold modification
  misc_feature (4)..(4): BNA scaffold modification
  misc_feature (18)..(18): BNA scaffold modification
gccgcugcccaaugccat

SEQ ID NO: 3398 - RNA, 18 nt, Artificial Sequence
  Antisense oligonucleotide
  misc_feature (1)..(1): BNA scaffold modification
  misc_feature (7)..(7): BNA scaffold modification
  misc_feature (18)..(18): BNA scaffold modification
gccgcugcccaaugccat

SEQ ID NO: 3399 - RNA, 18 nt, Artificial Sequence
  Antisense oligonucleotide
  misc_feature (1)..(1): BNA scaffold modification
  misc_feature (14)..(14): BNA scaffold modification
  misc_feature (18)..(18): BNA scaffold modification
gccgcugcccaaugccat

SEQ ID NO: 3400 - RNA, 18 nt, Artificial Sequence
  Antisense oligonucleotide
  misc_feature (1)..(1): BNA scaffold modification
  misc_feature (5)..(5): BNA scaffold modification
  misc_feature (18)..(18): BNA scaffold modification
gccgcugcccaaugccat

SEQ ID NO: 3401 - RNA, 18 nt, Artificial Sequence
  Antisense oligonucleotide
  misc_feature (1)..(1): BNA scaffold modification
  misc_feature (10)..(10): BNA scaffold modification
  misc_feature (18)..(18): BNA scaffold modification
gccgcugcccaaugccat

SEQ ID NO: 3402 - RNA, 18 nt, Artificial Sequence
  Antisense oligonucleotide
  misc_feature (1)..(1): BNA scaffold modification
  misc_feature (16)..(16): BNA scaffold modification
  misc_feature (18)..(18): BNA scaffold modification
gccgcugcccaaugccat

SEQ ID NO: 3403 - RNA, 18 nt, Artificial Sequence
  Antisense oligonucleotide
  misc_feature (1)..(1): BNA scaffold modification
  misc_feature (10)..(10): BNA scaffold modification
  misc_feature (16)..(16): BNA scaffold modification
  misc_feature (18)..(18): BNA scaffold modification
gccgcugcccaaugccat

SEQ ID NO: 3404 - RNA, 18 nt, Artificial Sequence
  Antisense oligonucleotide
  misc_feature (1)..(1): BNA scaffold modification
  misc_feature (5)..(5): BNA scaffold modification
  misc_feature (10)..(10): BNA scaffold modification
  misc_feature (18)..(18): BNA scaffold modification
gccgcugcccaaugccat

SEQ ID NO: 3405 - RNA, 18 nt, Artificial Sequence
  Antisense oligonucleotide
  misc_feature (1)..(1): BNA scaffold modification
  misc_feature (4)..(4): BNA scaffold modification
  misc_feature (14)..(14): BNA scaffold modification
  misc_feature (18)..(18): BNA scaffold modification
gccgcugcccaaugccat

SEQ ID NO: 3406 - RNA, 18 nt, Artificial Sequence
  Antisense oligonucleotide
  misc_feature (1)..(1): BNA scaffold modification
  misc_feature (7)..(7): BNA scaffold modification
  misc_feature (14)..(14): BNA scaffold modification
  misc_feature (18)..(18): BNA scaffold modification
gccgcugcccaaugccat

SEQ ID NO: 3407 - RNA, 18 nt, Artificial Sequence
  Antisense oligonucleotide
  misc_feature (1)..(2): BNA scaffold modification
  misc_feature (17)..(18): BNA scaffold modification
gccgcugcccaaugccat

SEQ ID NO: 3408 - RNA, 18 nt, Artificial Sequence
  Antisense oligonucleotide
  misc_feature (1)..(2): BNA scaffold modification
  misc_feature (10)..(10): BNA scaffold modification
  misc_feature (17)..(18): BNA scaffold modification
gccgcugcccaaugccat

SEQ ID NO: 3409 - RNA, 18 nt, Artificial Sequence
  Antisense oligonucleotide
  misc_feature (1)..(2): BNA scaffold modification
  misc_feature (7)..(7): BNA scaffold modification
  misc_feature (17)..(18): BNA scaffold modification
gccgcugcccaaugccat

SEQ ID NO: 3410 - RNA, 18 nt, Artificial Sequence
  Antisense oligonucleotide
  misc_feature (1)..(1): BNA scaffold modification
  misc_feature (18)..(18): BNA scaffold modification
ccgcugcccaaugccauc

SEQ ID NO: 3411 - RNA, 18 nt, Artificial Sequence
  Antisense oligonucleotide
  misc_feature (1)..(1): BNA scaffold modification
  misc_feature (3)..(3): BNA scaffold modification
  misc_feature (18)..(18): BNA scaffold modification
ccgcugcccaaugccauc

SEQ ID NO: 3412 - RNA, 18 nt, Artificial Sequence
  Antisense oligonucleotide
  misc_feature (1)..(1): BNA scaffold modification
  misc_feature (6)..(6): BNA scaffold modification
  misc_feature (18)..(18): BNA scaffold modification
ccgcugcccaaugccauc

SEQ ID NO: 3413 - RNA, 18 nt, Artificial Sequence
  Antisense oligonucleotide
  misc_feature (1)..(1): BNA scaffold modification
  misc_feature (13)..(13): BNA scaffold modification
  misc_feature (18)..(18): BNA scaffold modification
ccgcugcccaaugccauc

SEQ ID NO: 3414 - RNA, 18 nt, Artificial Sequence
  Antisense oligonucleotide
  misc_feature (1)..(1): BNA scaffold modification
  misc_feature (4)..(4): BNA scaffold modification
  misc_feature (18)..(18): BNA scaffold modification
ccgcugcccaaugccauc

SEQ ID NO: 3415 - RNA, 18 nt, Artificial Sequence
  Antisense oligonucleotide
  misc_feature (1)..(1): BNA scaffold modification
  misc_feature (9)..(9): BNA scaffold modification
  misc_feature (18)..(18): BNA scaffold modification
ccgcugcccaaugccauc

SEQ ID NO: 3416 - RNA, 18 nt, Artificial Sequence
  Antisense oligonucleotide
  misc_feature (1)..(1): BNA scaffold modification
  misc_feature (15)..(15): BNA scaffold modification
  misc_feature (18)..(18): BNA scaffold modification
ccgcugcccaaugccauc

SEQ ID NO: 3417 - RNA, 18 nt, Artificial Sequence
  Antisense oligonucleotide
  misc_feature (1)..(1): BNA scaffold modification
  misc_feature (6)..(6): BNA scaffold modification
  misc_feature (13)..(13): BNA scaffold modification
  misc_feature (18)..(18): BNA scaffold modification
ccgcugcccaaugccauc

SEQ ID NO: 3418 - RNA, 18 nt, Artificial Sequence
  Antisense oligonucleotide
  misc_feature (1)..(1): BNA scaffold modification
  misc_feature (4)..(4): BNA scaffold modification
  misc_feature (9)..(9): BNA scaffold modification
  misc_feature (18)..(18): BNA scaffold modification
ccgcugcccaaugccauc

SEQ ID NO: 3419 - RNA, 18 nt, Artificial Sequence
  Antisense oligonucleotide
  misc_feature (1)..(1): BNA scaffold modification
  misc_feature (9)..(9): BNA scaffold modification
  misc_feature (15)..(15): BNA scaffold modification
  misc_feature (18)..(18): BNA scaffold modification
ccgcugcccaaugccauc

SEQ ID NO: 3420 - RNA, 18 nt, Artificial Sequence
  Antisense oligonucleotide
  misc_feature (1)..(2): BNA scaffold modification
  misc_feature (17)..(18): BNA scaffold modification
ccgcugcccaaugccatc

SEQ ID NO: 3421 - RNA, 18 nt, Artificial Sequence
  Antisense oligonucleotide
  misc_feature (1)..(2): BNA scaffold modification
  misc_feature (9)..(9): BNA scaffold modification
  misc_feature (17)..(18): BNA scaffold modification
ccgcugcccaaugccatc

SEQ ID NO: 3422 - RNA, 18 nt, Artificial Sequence
  Antisense oligonucleotide
  misc_feature (1)..(1): BNA scaffold modification
  misc_feature (18)..(18): BNA scaffold modification
cgcugcccaaugccaucc

SEQ ID NO: 3423 - RNA, 18 nt, Artificial Sequence
  Antisense oligonucleotide
  misc_feature (1)..(1): BNA scaffold modification
  misc_feature (5)..(5): BNA scaffold modification
  misc_feature (18)..(18): BNA scaffold modification
cgcugcccaaugccaucc

SEQ ID NO: 3424 - RNA, 18 nt, Artificial Sequence
  Antisense oligonucleotide
  misc_feature (1)..(1): BNA scaffold modification
  misc_feature (12)..(12): BNA scaffold modification
  misc_feature (18)..(18): BNA scaffold modification
cgcugcccaaugccaucc

SEQ ID NO: 3425 - RNA, 18 nt, Artificial Sequence
  Antisense oligonucleotide
  misc_feature (1)..(1): BNA scaffold modification
  misc_feature (14)..(14): BNA scaffold modification
  misc_feature (18)..(18): BNA scaffold modification
cgcugcccaaugccaucc

SEQ ID NO: 3426 - RNA, 18 nt, Artificial Sequence
  Antisense oligonucleotide
  misc_feature (1)..(1): BNA scaffold modification
  misc_feature (8)..(8): BNA scaffold modification
  misc_feature (18)..(18): BNA scaffold modification
cgcugcccaaugccaucc

SEQ ID NO: 3427 - RNA, 18 nt, Artificial Sequence
  Antisense oligonucleotide
  misc_feature (1)..(1): BNA scaffold modification
  misc_feature (3)..(3): BNA scaffold modification
  misc_feature (18)..(18): BNA scaffold modification
cgcugcccaaugccaucc

SEQ ID NO: 3428 - RNA, 18 nt, Artificial Sequence
  Antisense oligonucleotide
  misc_feature (1)..(2): BNA scaffold modification
  misc_feature (5)..(5): BNA scaffold modification
  misc_feature (18)..(18): BNA scaffold modification
cgcugcccaaugccaucc

SEQ ID NO: 3429 - RNA, 18 nt, Artificial Sequence
  Antisense oligonucleotide
  misc_feature (1)..(1): BNA scaffold modification
  misc_feature (5)..(5): BNA scaffold modification
  misc_feature (12)..(12): BNA scaffold modification
  misc_feature (18)..(18): BNA scaffold modification
cgcugcccaaugccaucc

SEQ ID NO: 3430 - RNA, 18 nt, Artificial Sequence
  Antisense oligonucleotide
  misc_feature (1)..(1): BNA scaffold modification
  misc_feature (8)..(8): BNA scaffold modification
  misc_feature (14)..(14): BNA scaffold modification
  misc_feature (18)..(18): BNA scaffold modification
cgcugcccaaugccaucc

SEQ ID NO: 3431 - RNA, 18 nt, Artificial Sequence
  Antisense oligonucleotide
  misc_feature (1)..(1): BNA scaffold modification
  misc_feature (3)..(3): BNA scaffold modification
  misc_feature (8)..(8): BNA scaffold modification
  misc_feature (18)..(18): BNA scaffold modification
cgcugcccaaugccaucc

SEQ ID NO: 3432 - RNA, 18 nt, Artificial Sequence
  Antisense oligonucleotide
  misc_feature (1)..(1): BNA scaffold modification
  misc_feature (3)..(3): BNA scaffold modification
  misc_feature (14)..(14): BNA scaffold modification
  misc_feature (18)..(18): BNA scaffold modification
cgcugcccaaugccaucc

SEQ ID NO: 3433 - RNA, 18 nt, Artificial Sequence
  Antisense oligonucleotide
  misc_feature (1)..(2): BNA scaffold modification
  misc_feature (17)..(18): BNA scaffold modification
cgcugcccaaugccaucc

SEQ ID NO: 3434 - RNA, 18 nt, Artificial Sequence
  Antisense oligonucleotide
  misc_feature (1)..(2): BNA scaffold modification
  misc_feature (8)..(8): BNA scaffold modification
  misc_feature (17)..(18): BNA scaffold modification
cgcugcccaaugccaucc

SEQ ID NO: 3435 - RNA, 18 nt, Artificial Sequence
  Antisense oligonucleotide
  misc_feature (1)..(2): BNA scaffold modification
  misc_feature (12)..(12): BNA scaffold modification
  misc_feature (17)..(18): BNA scaffold modification
cgcugcccaaugccaucc

SEQ ID NO: 3436 - RNA, 18 nt, Artificial Sequence
  Antisense oligonucleotide
  misc_feature (1)..(1): BNA scaffold modification
  misc_feature (18)..(18): BNA scaffold modification
gcugcccaaugccaucct

SEQ ID NO: 3437 - RNA, 18 nt, Artificial Sequence
  Antisense oligonucleotide
  misc_feature (1)..(1): BNA scaffold modification
  misc_feature (4)..(4): BNA scaffold modification
  misc_feature (18)..(18): BNA scaffold modification
gcugcccaaugccaucct

SEQ ID NO: 3438 - RNA, 18 nt, Artificial Sequence
  Antisense oligonucleotide
  misc_feature (1)..(1): BNA scaffold modification
  misc_feature (11)..(11): BNA scaffold modification
  misc_feature (18)..(18): BNA scaffold modification
gcugcccaaugccaucct

SEQ ID NO: 3439 - RNA, 18 nt, Artificial Sequence
  Antisense oligonucleotide
  misc_feature (1)..(1): BNA scaffold modification
  misc_feature (4)..(4): BNA scaffold modification
  misc_feature (11)..(11): BNA scaffold modification
  misc_feature (18)..(18): BNA scaffold modification
gcugcccaaugccaucct

SEQ ID NO: 3440 - RNA, 18 nt, Artificial Sequence
  Antisense oligonucleotide
  misc_feature (1)..(1): BNA scaffold modification
  misc_feature (7)..(7): BNA scaffold modification
  misc_feature (18)..(18): BNA scaffold modification
gcugcccaaugccaucct

SEQ ID NO: 3441 - RNA, 18 nt, Artificial Sequence
  Antisense oligonucleotide
  misc_feature (1)..(1): BNA scaffold modification
  misc_feature (13)..(13): BNA scaffold modification
  misc_feature (18)..(18): BNA scaffold modification
gcugcccaaugccaucct

SEQ ID NO: 3442 - RNA, 18 nt, Artificial Sequence
  Antisense oligonucleotide
  misc_feature (1)..(1): BNA scaffold modification
  misc_feature (16)..(16): BNA scaffold modification
  misc_feature (18)..(18): BNA scaffold modification
gcugcccaaugccaucct

SEQ ID NO: 3443 - RNA, 18 nt, Artificial Sequence
  Antisense oligonucleotide
  misc_feature (1)..(1): BNA scaffold modification
  misc_feature (7)..(7): BNA scaffold modification
  misc_feature (13)..(13): BNA scaffold modification
  misc_feature (18)..(18): BNA scaffold modification
gcugcccaaugccaucct

SEQ ID NO: 3444 - RNA, 18 nt, Artificial Sequence
  Antisense oligonucleotide
  misc_feature (1)..(2): BNA scaffold modification
  misc_feature (17)..(18): BNA scaffold modification
gcugcccaaugccaucct

SEQ ID NO: 3445 - RNA, 18 nt, Artificial Sequence
  Antisense oligonucleotide
  misc_feature (1)..(2): BNA scaffold modification
  misc_feature (11)..(11): BNA scaffold modification
  misc_feature (17)..(18): BNA scaffold modification
gcugcccaaugccaucct

SEQ ID NO: 3446 - RNA, 18 nt, Artificial Sequence
  Antisense oligonucleotide
  misc_feature (1)..(2): BNA scaffold modification
  misc_feature (7)..(7): BNA scaffold modification
  misc_feature (17)..(18): BNA scaffold modification
gcugcccaaugccaucct

SEQ ID NO: 3447 - RNA, 18 nt, Artificial Sequence
  Antisense oligonucleotide
  misc_feature (1)..(1): BNA scaffold modification
  misc_feature (18)..(18): BNA scaffold modification
cugcccaaugccauccug

SEQ ID NO: 3448 - RNA, 18 nt, Artificial Sequence
  Antisense oligonucleotide
  misc_feature (1)..(1): BNA scaffold modification
  misc_feature (3)..(3): BNA scaffold modification
  misc_feature (18)..(18): BNA scaffold modification
cugcccaaugccauccug

SEQ ID NO: 3449 - RNA, 18 nt, Artificial Sequence
  Antisense oligonucleotide
  misc_feature (1)..(1): BNA scaffold modification
  misc_feature (10)..(10): BNA scaffold modification
  misc_feature (18)..(18): BNA scaffold modification
cugcccaaugccauccug

SEQ ID NO: 3450 - RNA, 18 nt, Artificial Sequence
  Antisense oligonucleotide
  misc_feature (1)..(1): BNA scaffold modification
  misc_feature (3)..(3): BNA scaffold modification
  misc_feature (10)..(10): BNA scaffold modification
  misc_feature (18)..(18): BNA scaffold modification
cugcccaaugccauccug

SEQ ID NO: 3451 - RNA, 18 nt, Artificial Sequence
  Antisense oligonucleotide
  misc_feature (1)..(1): BNA scaffold modification
  misc_feature (6)..(6): BNA scaffold modification
  misc_feature (18)..(18): BNA scaffold modification
cugcccaaugccauccug

SEQ ID NO: 3452 - RNA, 18 nt, Artificial Sequence
  Antisense oligonucleotide
  misc_feature (1)..(1): BNA scaffold modification
  misc_feature (12)..(12): BNA scaffold modification
  misc_feature (18)..(18): BNA scaffold modification
cugcccaaugccauccug

SEQ ID NO: 3453 - RNA, 18 nt, Artificial Sequence
  Antisense oligonucleotide
  misc_feature (1)..(1): BNA scaffold modification
  misc_feature (16)..(16): BNA scaffold modification
  misc_feature (18)..(18): BNA scaffold modification
cugcccaaugccauccug

SEQ ID NO: 3454 - RNA, 18 nt, Artificial Sequence
  Antisense oligonucleotide
  misc_feature (1)..(1): BNA scaffold modification
  misc_feature (6)..(6): BNA scaffold modification
  misc_feature (12)..(12): BNA scaffold modification
  misc_feature (18)..(18): BNA scaffold modification
cugcccaaugccauccug

SEQ ID NO: 3455 - RNA, 18 nt, Artificial Sequence
  Antisense oligonucleotide
  misc_feature (1)..(1): BNA scaffold modification
  misc_feature (6)..(6): BNA scaffold modification
  misc_feature (16)..(16): BNA scaffold modification
  misc_feature (18)..(18): BNA scaffold modification
cugcccaaugccauccug

SEQ ID NO: 3456 - RNA, 18 nt, Artificial Sequence
  Antisense oligonucleotide
  misc_feature (1)..(2): BNA scaffold modification
  misc_feature (17)..(18): BNA scaffold modification
ctgcccaaugccaucctg

SEQ ID NO: 3457 - RNA, 18 nt, Artificial Sequence
  Antisense oligonucleotide
  misc_feature (1)..(2): BNA scaffold modification
  misc_feature (10)..(10): BNA scaffold modification
  misc_feature (17)..(18): BNA scaffold modification
ctgcccaaugccaucctg

SEQ ID NO: 3458 - RNA, 18 nt, Artificial Sequence
  Antisense oligonucleotide
  misc_feature (1)..(2): BNA scaffold modification
  misc_feature (6)..(6): BNA scaffold modification
  misc_feature (12)..(12): BNA scaffold modification
  misc_feature (17)..(18): BNA scaffold modification
ctgcccaaugccaucctg

SEQ ID NO: 3459 - RNA, 16 nt, Artificial Sequence
  Antisense oligonucleotide
  misc_feature (1)..(1): BNA scaffold modification
  misc_feature (16)..(16): BNA scaffold modification
tuugccgcugcccaat

SEQ ID NO: 3460 - RNA, 16 nt, Artificial Sequence
  Antisense oligonucleotide
  misc_feature (1)..(1): BNA scaffold modification
  misc_feature (4)..(4): BNA scaffold modification
  misc_feature (16)..(16): BNA scaffold modification
tuugccgcugcccaat

SEQ ID NO: 3461 - RNA, 16 nt, Artificial Sequence
  Antisense oligonucleotide
  misc_feature (1)..(1): BNA scaffold modification
  misc_feature (7)..(7): BNA scaffold modification
  misc_feature (16)..(16): BNA scaffold modification
tuugccgcugcccaat

SEQ ID NO: 3462 - RNA, 16 nt, Artificial Sequence
  Antisense oligonucleotide
  misc_feature (1)..(1): BNA scaffold modification
  misc_feature (10)..(10): BNA scaffold modification
  misc_feature (16)..(16): BNA scaffold modification
tuugccgcugcccaat

SEQ ID NO: 3463 - RNA, 16 nt, Artificial Sequence
  Antisense oligonucleotide
  misc_feature (1)..(1): BNA scaffold modification
  misc_feature (4)..(4): BNA scaffold modification
  misc_feature (10)..(10): BNA scaffold modification
  misc_feature (16)..(16): BNA scaffold modification
tuugccgcugcccaat

SEQ ID NO: 3464 - RNA, 16 nt, Artificial Sequence
  Antisense oligonucleotide
  misc_feature (1)..(1): BNA scaffold modification
  misc_feature (13)..(13): BNA scaffold modification
  misc_feature (16)..(16): BNA scaffold modification
tuugccgcugcccaat

SEQ ID NO: 3465 - RNA, 16 nt, Artificial Sequence
  Antisense oligonucleotide
  misc_feature (1)..(1): BNA scaffold modification
  misc_feature (8)..(8): BNA scaffold modification
  misc_feature (16)..(16): BNA scaffold modification
tuugccgcugcccaat

SEQ ID NO: 3466 - RNA, 16 nt, Artificial Sequence
  Antisense oligonucleotide
  misc_feature (1)..(1): BNA scaffold modification
  misc_feature (8)..(8): BNA scaffold modification
  misc_feature (13)..(13): BNA scaffold modification
  misc_feature (16)..(16): BNA scaffold modification
tuugccgcugcccaat

SEQ ID NO: 3467 - RNA, 16 nt, Artificial Sequence
  Antisense oligonucleotide
  misc_feature (1)..(1): BNA scaffold modification
  misc_feature (5)..(5): BNA scaffold modification
  misc_feature (11)..(11): BNA scaffold modification
  misc_feature (16)..(16): BNA scaffold modification
tuugccgcugcccaat

SEQ ID NO: 3468 - RNA, 16 nt, Artificial Sequence
  Antisense oligonucleotide
  misc_feature (1)..(2): BNA scaffold modification
  misc_feature (15)..(16): BNA scaffold modification
ttugccgcugcccaat

SEQ ID NO: 3469 - RNA, 16 nt, Artificial Sequence
  Antisense oligonucleotide
  misc_feature (1)..(2): BNA scaffold modification
  misc_feature (10)..(10): BNA scaffold modification
  misc_feature (15)..(16): BNA scaffold modification
ttugccgcugcccaat

SEQ ID NO: 3470 - RNA, 16 nt, Artificial Sequence
  Antisense oligonucleotide
  misc_feature (1)..(2): BNA scaffold modification
  misc_feature (7)..(7): BNA scaffold modification
  misc_feature (15)..(16): BNA scaffold modification
tuugccgcugcccaat

SEQ ID NO: 3471 - RNA, 16 nt, Artificial Sequence
  Antisense oligonucleotide
  misc_feature (1)..(1): BNA scaffold modification
  misc_feature (16)..(16): BNA scaffold modification
tugccgcugcccaaug

SEQ ID NO: 3472 - RNA, 16 nt, Artificial Sequence
  Antisense oligonucleotide
  misc_feature (1)..(1): BNA scaffold modification
  misc_feature (3)..(3): BNA scaffold modification
  misc_feature (16)..(16): BNA scaffold modification
tugccgcugcccaaug

SEQ ID NO: 3473 - RNA, 16 nt, Artificial Sequence
  Antisense oligonucleotide
  misc_feature (1)..(1): BNA scaffold modification
  misc_feature (6)..(6): BNA scaffold modification
  misc_feature (16)..(16): BNA scaffold modification
tugccgcugcccaaug

SEQ ID NO: 3474 - RNA, 16 nt, Artificial Sequence
  Antisense oligonucleotide
  misc_feature (1)..(1): BNA scaffold modification
  misc_feature (9)..(9): BNA scaffold modification
  misc_feature (16)..(16): BNA scaffold modification
tugccgcugcccaaug

SEQ ID NO: 3475 - RNA, 16 nt, Artificial Sequence
  Antisense oligonucleotide
  misc_feature (1)..(1): BNA scaffold modification
  misc_feature (3)..(3): BNA scaffold modification
  misc_feature (9)..(9): BNA scaffold modification
  misc_feature (16)..(16): BNA scaffold modification
tugccgcugcccaaug

SEQ ID NO: 3476 - RNA, 16 nt, Artificial Sequence
  Antisense oligonucleotide
  misc_feature (1)..(1): BNA scaffold modification
  misc_feature (7)..(7): BNA scaffold modification
  misc_feature (16)..(16): BNA scaffold modification
tugccgcugcccaaug

SEQ ID NO: 3477 - RNA, 16 nt, Artificial Sequence
  Antisense oligonucleotide
  misc_feature (1)..(1): BNA scaffold modification
  misc_feature (12)..(12): BNA scaffold modification
  misc_feature (16)..(16): BNA scaffold modification
tugccgcugcccaaug

SEQ ID NO: 3478 - RNA, 16 nt, Artificial Sequence
  Antisense oligonucleotide
  misc_feature (1)..(1): BNA scaffold modification
  misc_feature (7)..(7): BNA scaffold modification
  misc_feature (12)..(12): BNA scaffold modification
  misc_feature (16)..(16): BNA scaffold modification
tugccgcugcccaaug

SEQ ID NO: 3479 - RNA, 16 nt, Artificial Sequence
  Antisense oligonucleotide
  misc_feature (1)..(1): BNA scaffold modification
  misc_feature (3)..(3): BNA scaffold modification
  misc_feature (7)..(7): BNA scaffold modification
  misc_feature (9)..(9): BNA scaffold modification
  misc_feature (12)..(12): BNA scaffold modification
  misc_feature (16)..(16): BNA scaffold modification
tugccgcugcccaaug

SEQ ID NO: 3480 - RNA, 16 nt, Artificial Sequence
  Antisense oligonucleotide
  misc_feature (1)..(2): BNA scaffold modification
  misc_feature (15)..(16): BNA scaffold modification
ttgccgcugcccaatg

SEQ ID NO: 3481 - RNA, 16 nt, Artificial Sequence
  Antisense oligonucleotide
  misc_feature (1)..(2): BNA scaffold modification
  misc_feature (9)..(9): BNA scaffold modification
  misc_feature (15)..(16): BNA scaffold modification
ttgccgcugcccaatg

SEQ ID NO: 3482 - RNA, 16 nt, Artificial Sequence
  Antisense oligonucleotide
  misc_feature (1)..(1): BNA scaffold modification
  misc_feature (16)..(16): BNA scaffold modification
tgccgcugcccaaugc

SEQ ID NO: 3483 - RNA, 16 nt, Artificial Sequence
  Antisense oligonucleotide
  misc_feature (1)..(2): BNA scaffold modification
  misc_feature (16)..(16): BNA scaffold modification
tgccgcugcccaaugc

SEQ ID NO: 3484 - RNA, 16 nt, Artificial Sequence
  Antisense oligonucleotide
  misc_feature (1)..(1): BNA scaffold modification
  misc_feature (5)..(5): BNA scaffold modification
  misc_feature (16)..(16): BNA scaffold modification
tgccgcugcccaaugc

SEQ ID NO: 3485 - RNA, 16 nt, Artificial Sequence
  Antisense oligonucleotide
  misc_feature (1)..(1): BNA scaffold modification
  misc_feature (8)..(8): BNA scaffold modification
  misc_feature (16)..(16): BNA scaffold modification
tgccgcugcccaaugc

SEQ ID NO: 3486 - RNA, 16 nt, Artificial Sequence
  Antisense oligonucleotide
  misc_feature (1)..(1): BNA scaffold modification
  misc_feature (15)..(16): BNA scaffold modification
tgccgcugcccaaugc

SEQ ID NO: 3487 - RNA, 16 nt, Artificial Sequence
  Antisense oligonucleotide
  misc_feature (1)..(1): BNA scaffold modification
  misc_feature (8)..(8): BNA scaffold modification
  misc_feature (15)..(16): BNA scaffold modification
tgccgcugcccaaugc

SEQ ID NO: 3488 - RNA, 16 nt, Artificial Sequence
  Antisense oligonucleotide
  misc_feature (1)..(2): BNA scaffold modification
  misc_feature (8)..(8): BNA scaffold modification
  misc_feature (16)..(16): BNA scaffold modification
tgccgcugcccaaugc

SEQ ID NO: 3489 - RNA, 16 nt, Artificial Sequence
  Antisense oligonucleotide
  misc_feature (1)..(1): BNA scaffold modification
  misc_feature (6)..(6): BNA scaffold modification
  misc_feature (16)..(16): BNA scaffold modification
tgccgcugcccaaugc

SEQ ID NO: 3490 - RNA, 16 nt, Artificial Sequence
  Antisense oligonucleotide
  misc_feature (1)..(1): BNA scaffold modification
  misc_feature (11)..(11): BNA scaffold modification
  misc_feature (16)..(16): BNA scaffold modification
tgccgcugcccaaugc

SEQ ID NO: 3491 - RNA, 16 nt, Artificial Sequence
  Antisense oligonucleotide
  misc_feature (1)..(1): BNA scaffold modification
  misc_feature (6)..(6): BNA scaffold modification
  misc_feature (11)..(11): BNA scaffold modification
  misc_feature (16)..(16): BNA scaffold modification
tgccgcugcccaaugc

SEQ ID NO: 3492 - RNA, 16 nt, Artificial Sequence
  Antisense oligonucleotide
  misc_feature (1)..(2): BNA scaffold modification
  misc_feature (15)..(16): BNA scaffold modification
tgccgcugcccaaugc

SEQ ID NO: 3493 - RNA, 16 nt, Artificial Sequence
  Antisense oligonucleotide
  misc_feature (1)..(2): BNA scaffold modification
  misc_feature (8)..(8): BNA scaffold modification
  misc_feature (15)..(16): BNA scaffold modification
tgccgcugcccaaugc

SEQ ID NO: 3494 - RNA, 16 nt, Artificial Sequence
  Antisense oligonucleotide
  misc_feature (1)..(1): BNA scaffold modification
  misc_feature (16)..(16): BNA scaffold modification
gccgcugcccaaugcc

SEQ ID NO: 3495 - RNA, 16 nt, Artificial Sequence
  Antisense oligonucleotide
  misc_feature (1)..(1): BNA scaffold modification
  misc_feature (4)..(4): BNA scaffold modification
  misc_feature (16)..(16): BNA scaffold modification
gccgcugcccaaugcc

SEQ ID NO: 3496 - RNA, 16 nt, Artificial Sequence
  Antisense oligonucleotide
  misc_feature (1)..(1): BNA scaffold modification
  misc_feature (7)..(7): BNA scaffold modification
  misc_feature (16)..(16): BNA scaffold modification
gccgcugcccaaugcc

SEQ ID NO: 3497 - RNA, 16 nt, Artificial Sequence
  Antisense oligonucleotide
  misc_feature (1)..(1): BNA scaffold modification
  misc_feature (14)..(14): BNA scaffold modification
  misc_feature (16)..(16): BNA scaffold modification
gccgcugcccaaugcc

SEQ ID NO: 3498 - RNA, 16 nt, Artificial Sequence
  Antisense oligonucleotide
  misc_feature (1)..(1): BNA scaffold modification
  misc_feature (7)..(7): BNA scaffold modification
  misc_feature (14)..(14): BNA scaffold modification
  misc_feature (16)..(16): BNA scaffold modification
gccgcugcccaaugcc

SEQ ID NO: 3499 - RNA, 16 nt, Artificial Sequence
  Antisense oligonucleotide
  misc_feature (1)..(1): BNA scaffold modification
  misc_feature (4)..(4): BNA scaffold modification
  misc_feature (7)..(7): BNA scaffold modification
  misc_feature (16)..(16): BNA scaffold modification
gccgcugcccaaugcc

SEQ ID NO: 3500 - RNA, 16 nt, Artificial Sequence
  Antisense oligonucleotide
  misc_feature (1)..(1): BNA scaffold modification
  misc_feature (10)..(10): BNA scaffold modification
  misc_feature (16)..(16): BNA scaffold modification
gccgcugcccaaugcc

SEQ ID NO: 3501 - RNA, 16 nt, Artificial Sequence
  Antisense oligonucleotide
  misc_feature (1)..(1): BNA scaffold modification
  misc_feature (5)..(5): BNA scaffold modification
  misc_feature (16)..(16): BNA scaffold modification
gccgcugcccaaugcc

SEQ ID NO: 3502 - RNA, 16 nt, Artificial Sequence
  Antisense oligonucleotide
  misc_feature (1)..(1): BNA scaffold modification
  misc_feature (5)..(5): BNA scaffold modification
  misc_feature (10)..(10): BNA scaffold modification
  misc_feature (16)..(16): BNA scaffold modification
gccgcugcccaaugcc

SEQ ID NO: 3503 - RNA, 16 nt, Artificial Sequence
  Antisense oligonucleotide
  misc_feature (1)..(2): BNA scaffold modification
  misc_feature (15)..(16): BNA scaffold modification
gccgcugcccaaugcc

SEQ ID NO: 3504 - RNA, 16 nt, Artificial Sequence
  Antisense oligonucleotide
  misc_feature (1)..(2): BNA scaffold modification
  misc_feature (7)..(7): BNA scaffold modification
  misc_feature (15)..(16): BNA scaffold modification
gccgcugcccaaugcc

SEQ ID NO: 3505 - RNA, 16 nt, Artificial Sequence
  Antisense oligonucleotide
  misc_feature (1)..(1): BNA scaffold modification
  misc_feature (16)..(16): BNA scaffold modification
ccgcugcccaaugcca

SEQ ID NO: 3506 - RNA, 16 nt, Artificial Sequence
  Antisense oligonucleotide
  misc_feature (1)..(1): BNA scaffold modification
  misc_feature (3)..(3): BNA scaffold modification
  misc_feature (16)..(16): BNA scaffold modification
ccgcugcccaaugcca

SEQ ID NO: 3507 - RNA, 16 nt, Artificial Sequence
  Antisense oligonucleotide
  misc_feature (1)..(1): BNA scaffold modification
  misc_feature (6)..(6): BNA scaffold modification
  misc_feature (16)..(16): BNA scaffold modification
ccgcugcccaaugcca

SEQ ID NO: 3508 - RNA, 16 nt, Artificial Sequence
  Antisense oligonucleotide
  misc_feature (1)..(1): BNA scaffold modification
  misc_feature (13)..(13): BNA scaffold modification
  misc_feature (16)..(16): BNA scaffold modification
ccgcugcccaaugcca

SEQ ID NO: 3509 - RNA, 16 nt, Artificial Sequence
  Antisense oligonucleotide
  misc_feature (1)..(1): BNA scaffold modification
  misc_feature (6)..(6): BNA scaffold modification
  misc_feature (13)..(13): BNA scaffold modification
  misc_feature (16)..(16): BNA scaffold modification
ccgcugcccaaugcca

SEQ ID NO: 3510 - RNA, 16 nt, Artificial Sequence
  Antisense oligonucleotide
  misc_feature (1)..(1): BNA scaffold modification
  misc_feature (4)..(4): BNA scaffold modification
  misc_feature (16)..(16): BNA scaffold modification
ccgcugcccaaugcca

SEQ ID NO: 3511 - RNA, 16 nt, Artificial Sequence
  Antisense oligonucleotide
  misc_feature (1)..(1): BNA scaffold modification
  misc_feature (9)..(9): BNA scaffold modification
  misc_feature (16)..(16): BNA scaffold modification
ccgcugcccaaugcca

SEQ ID NO: 3512 - RNA, 16 nt, Artificial Sequence
  Antisense oligonucleotide
  misc_feature (1)..(1): BNA scaffold modification
  misc_feature (4)..(4): BNA scaffold modification
  misc_feature (9)..(9): BNA scaffold modification
  misc_feature (16)..(16): BNA scaffold modification
ccgcugcccaaugcca

SEQ ID NO: 3513 - RNA, 16 nt, Artificial Sequence
  Antisense oligonucleotide
  misc_feature (1)..(1): BNA scaffold modification
  misc_feature (4)..(4): BNA scaffold modification
  misc_feature (9)..(9): BNA scaffold modification
  misc_feature (13)..(13): BNA scaffold modification
  misc_feature (16)..(16): BNA scaffold modification
ccgcugcccaaugcca

SEQ ID NO: 3514 - RNA, 16 nt, Artificial Sequence
  Antisense oligonucleotide
  misc_feature (1)..(2): BNA scaffold modification
  misc_feature (15)..(16): BNA scaffold modification
ccgcugcccaaugcca

SEQ ID NO: 3515 - RNA, 16 nt, Artificial Sequence
  Antisense oligonucleotide
  misc_feature (1)..(2): BNA scaffold modification
  misc_feature (9)..(9): BNA scaffold modification
  misc_feature (15)..(16): BNA scaffold modification
ccgcugcccaaugcca

SEQ ID NO: 3516 - RNA, 16 nt, Artificial Sequence
  Antisense oligonucleotide
  misc_feature (1)..(1): BNA scaffold modification
  misc_feature (16)..(16): BNA scaffold modification
cgcugcccaaugccat

SEQ ID NO: 3517 - RNA, 16 nt, Artificial Sequence
  Antisense oligonucleotide
  misc_feature (1)..(2): BNA scaffold modification
  misc_feature (16)..(16): BNA scaffold modification
cgcugcccaaugccat

SEQ ID NO: 3518 - RNA, 16 nt, Artificial Sequence
  Antisense oligonucleotide
  misc_feature (1)..(1): BNA scaffold modification
  misc_feature (5)..(5): BNA scaffold modification
  misc_feature (16)..(16): BNA scaffold modification
cgcugcccaaugccat

SEQ ID NO: 3519 - RNA, 16 nt, Artificial Sequence
  Antisense oligonucleotide
  misc_feature (1)..(1): BNA scaffold modification
  misc_feature (12)..(12): BNA scaffold modification
  misc_feature (16)..(16): BNA scaffold modification
cgcugcccaaugccat

SEQ ID NO: 3520 - RNA, 16 nt, Artificial Sequence
  Antisense oligonucleotide
  misc_feature (1)..(1): BNA scaffold modification
  misc_feature (5)..(5): BNA scaffold modification
  misc_feature (12)..(12): BNA scaffold modification
  misc_feature (16)..(16): BNA scaffold modification
cgcugcccaaugccat

SEQ ID NO: 3521 - RNA, 16 nt, Artificial Sequence
  Antisense oligonucleotide
  misc_feature (1)..(1): BNA scaffold modification
  misc_feature (3)..(3): BNA scaffold modification
  misc_feature (16)..(16): BNA scaffold modification
cgcugcccaaugccat

SEQ ID NO: 3522 - RNA, 16 nt, Artificial Sequence
  Antisense oligonucleotide
  misc_feature (1)..(1): BNA scaffold modification
  misc_feature (8)..(8): BNA scaffold modification
  misc_feature (16)..(16): BNA scaffold modification
cgcugcccaaugccat

SEQ ID NO: 3523 - RNA, 16 nt, Artificial Sequence
  Antisense oligonucleotide
  misc_feature (1)..(1): BNA scaffold modification
  misc_feature (14)..(14): BNA scaffold modification
  misc_feature (16)..(16): BNA scaffold modification
cgcugcccaaugccat

SEQ ID NO: 3524 - RNA, 16 nt, Artificial Sequence
  Antisense oligonucleotide
  misc_feature (1)..(1): BNA scaffold modification
  misc_feature (8)..(8): BNA scaffold modification
  misc_feature (14)..(14): BNA scaffold modification
  misc_feature (16)..(16): BNA scaffold modification
cgcugcccaaugccat

SEQ ID NO: 3525 - RNA, 16 nt, Artificial Sequence
  Antisense oligonucleotide
  misc_feature (1)..(1): BNA scaffold modification
  misc_feature (3)..(3): BNA scaffold modification
  misc_feature (8)..(8): BNA scaffold modification
  misc_feature (16)..(16): BNA scaffold modification
cgcugcccaaugccat

SEQ ID NO: 3526 - RNA, 16 nt, Artificial Sequence
  Antisense oligonucleotide
  misc_feature (1)..(2): BNA scaffold modification
  misc_feature (15)..(16): BNA scaffold modification
cgcugcccaaugccat

SEQ ID NO: 3527 - RNA, 16 nt, Artificial Sequence
  Antisense oligonucleotide
  misc_feature (1)..(2): BNA scaffold modification
  misc_feature (8)..(8): BNA scaffold modification
  misc_feature (15)..(16): BNA scaffold modification
cgcugcccaaugccat

SEQ ID NO: 3528 - RNA, 16 nt, Artificial Sequence
  Antisense oligonucleotide
  misc_feature (1)..(1): BNA scaffold modification
  misc_feature (16)..(16): BNA scaffold modification
gcugcccaaugccauc

SEQ ID NO: 3529 - RNA, 16 nt, Artificial Sequence
  Antisense oligonucleotide
  misc_feature (1)..(1): BNA scaffold modification
  misc_feature (4)..(4): BNA scaffold modification
  misc_feature (16)..(16): BNA scaffold modification
gcugcccaaugccauc

SEQ ID NO: 3530 - RNA, 16 nt, Artificial Sequence
  Antisense oligonucleotide
  misc_feature (1)..(1): BNA scaffold modification
  misc_feature (11)..(11): BNA scaffold modification
  misc_feature (16)..(16): BNA scaffold modification
gcugcccaaugccauc

SEQ ID NO: 3531 - RNA, 16 nt, Artificial Sequence
  Antisense oligonucleotide
  misc_feature (1)..(1): BNA scaffold modification
  misc_feature (4)..(4): BNA scaffold modification
  misc_feature (11)..(11): BNA scaffold modification
  misc_feature (16)..(16): BNA scaffold modification
gcugcccaaugccauc

SEQ ID NO: 3532 - RNA, 16 nt, Artificial Sequence
  Antisense oligonucleotide
  misc_feature (1)..(2): BNA scaffold modification
  misc_feature (16)..(16): BNA scaffold modification
gcugcccaaugccauc

SEQ ID NO: 3533 - RNA, 16 nt, Artificial Sequence
  Antisense oligonucleotide
  misc_feature (1)..(1): BNA scaffold modification
  misc_feature (7)..(7): BNA scaffold modification
  misc_feature (16)..(16): BNA scaffold modification
gcugcccaaugccauc

SEQ ID NO: 3534 - RNA, 16 nt, Artificial Sequence
  Antisense oligonucleotide
  misc_feature (1)..(1): BNA scaffold modification
  misc_feature (13)..(13): BNA scaffold modification
  misc_feature (16)..(16): BNA scaffold modification
gcugcccaaugccauc

SEQ ID NO: 3535 - RNA, 16 nt, Artificial Sequence
  Antisense oligonucleotide
  misc_feature (1)..(1): BNA scaffold modification
  misc_feature (7)..(7): BNA scaffold modification
  misc_feature (13)..(13): BNA scaffold modification
  misc_feature (16)..(16): BNA scaffold modification
gcugcccaaugccauc

SEQ ID NO: 3536 - RNA, 16 nt, Artificial Sequence
  Antisense oligonucleotide
  misc_feature (1)..(2): BNA scaffold modification
  misc_feature (7)..(7): BNA scaffold modification
  misc_feature (16)..(16): BNA scaffold modification
gcugcccaaugccauc

SEQ ID NO: 3537 - RNA, 16 nt, Artificial Sequence
  Antisense oligonucleotide
  misc_feature (1)..(2): BNA scaffold modification
  misc_feature (15)..(16): BNA scaffold modification
gcugcccaaugccatc

SEQ ID NO: 3538 - RNA, 16 nt, Artificial Sequence
  Antisense oligonucleotide
  misc_feature (1)..(2): BNA scaffold modification
  misc_feature (4)..(4): BNA scaffold modification
  misc_feature (11)..(11): BNA scaffold modification
  misc_feature (15)..(16): BNA scaffold modification
gcugcccaaugccatc

SEQ ID NO: 3539 - RNA, 16 nt, Artificial Sequence
  Antisense oligonucleotide
  misc_feature (1)..(1): BNA scaffold modification
  misc_feature (16)..(16): BNA scaffold modification
cugcccaaugccaucc

SEQ ID NO: 3540 - RNA, 16 nt, Artificial Sequence
  Antisense oligonucleotide
  misc_feature (1)..(1): BNA scaffold modification
  misc_feature (3)..(3): BNA scaffold modification
  misc_feature (16)..(16): BNA scaffold modification
cugcccaaugccaucc

SEQ ID NO: 3541 - RNA, 16 nt, Artificial Sequence
  Antisense oligonucleotide
  misc_feature (1)..(1): BNA scaffold modification
  misc_feature (10)..(10): BNA scaffold modification
  misc_feature (16)..(16): BNA scaffold modification
cugcccaaugccaucc

SEQ ID NO: 3542 - RNA, 16 nt, Artificial Sequence
  Antisense oligonucleotide
  misc_feature (1)..(1): BNA scaffold modification
  misc_feature (3)..(3): BNA scaffold modification
  misc_feature (10)..(10): BNA scaffold modification
  misc_feature (16)..(16): BNA scaffold modification
cugcccaaugccaucc

SEQ ID NO: 3543 - RNA, 16 nt, Artificial Sequence
  Antisense oligonucleotide
  misc_feature (1)..(1): BNA scaffold modification
  misc_feature (6)..(6): BNA scaffold modification
  misc_feature (16)..(16): BNA scaffold modification
cugcccaaugccaucc

SEQ ID NO: 3544 - RNA, 16 nt, Artificial Sequence
  Antisense oligonucleotide
  misc_feature (1)..(1): BNA scaffold modification
  misc_feature (12)..(12): BNA scaffold modification
  misc_feature (16)..(16): BNA scaffold modification
cugcccaaugccaucc

SEQ ID NO: 3545 - RNA, 16 nt, Artificial Sequence
  Antisense oligonucleotide
  misc_feature (1)..(1): BNA scaffold modification
  misc_feature (6)..(6): BNA scaffold modification
  misc_feature (12)..(12): BNA scaffold modification
  misc_feature (16)..(16): BNA scaffold modification
cugcccaaugccaucc

SEQ ID NO: 3546 - RNA, 16 nt, Artificial Sequence
  Antisense oligonucleotide
  misc_feature (1)..(1): BNA scaffold modification
  misc_feature (6)..(6): BNA scaffold modification
  misc_feature (15)..(16): BNA scaffold modification
cugcccaaugccaucc

SEQ ID NO: 3547 - RNA, 16 nt, Artificial Sequence
  Antisense oligonucleotide
  misc_feature (1)..(2): BNA scaffold modification
  misc_feature (15)..(16): BNA scaffold modification
ctgcccaaugccaucc

SEQ ID NO: 3548 - RNA, 16 nt, Artificial Sequence
  Antisense oligonucleotide
  misc_feature (1)..(2): BNA scaffold modification
  misc_feature (10)..(10): BNA scaffold modification
  misc_feature (15)..(16): BNA scaffold modification
ctgcccaaugccaucc

SEQ ID NO: 3549 - RNA, 16 nt, Artificial Sequence
  Antisense oligonucleotide
  misc_feature (1)..(2): BNA scaffold modification
  misc_feature (6)..(6): BNA scaffold modification
  misc_feature (15)..(16): BNA scaffold modification
ctgcccaaugccaucc

SEQ ID NO: 3550 - RNA, 16 nt, Artificial Sequence
  Antisense oligonucleotide
  misc_feature (1)..(1): BNA scaffold modification
  misc_feature (16)..(16): BNA scaffold modification
tgcccaaugccaucct

SEQ ID NO: 3551 - RNA, 16 nt, Artificial Sequence
  Antisense oligonucleotide
  misc_feature (1)..(1): BNA scaffold modification
  misc_feature (5)..(5): BNA scaffold modification
  misc_feature (16)..(16): BNA scaffold modification
tgcccaaugccaucct

SEQ ID NO: 3552 - RNA, 16 nt, Artificial Sequence
  Antisense oligonucleotide
  misc_feature (1)..(1): BNA scaffold modification
  misc_feature (11)..(11): BNA scaffold modification
  misc_feature (16)..(16): BNA scaffold modification
tgcccaaugccaucct

SEQ ID NO: 3553 - RNA, 16 nt, Artificial Sequence
  Antisense oligonucleotide
  misc_feature (1)..(1): BNA scaffold modification
  misc_feature (14)..(14): BNA scaffold modification
  misc_feature (16)..(16): BNA scaffold modification
tgcccaaugccaucct

SEQ ID NO: 3554 - RNA, 16 nt, Artificial Sequence
  Antisense oligonucleotide
  misc_feature (1)..(1): BNA scaffold modification
  misc_feature (5)..(5): BNA scaffold modification
  misc_feature (11)..(11): BNA scaffold modification
  misc_feature (16)..(16): BNA scaffold modification
tgcccaaugccaucct

SEQ ID NO: 3555 - RNA, 16 nt, Artificial Sequence
  Antisense oligonucleotide
  misc_feature (1)..(2): BNA scaffold modification
  misc_feature (16)..(16): BNA scaffold modification
tgcccaaugccaucct

SEQ ID NO: 3556 - RNA, 16 nt, Artificial Sequence
  Antisense oligonucleotide
  misc_feature (1)..(1): BNA scaffold modification
  misc_feature (9)..(9): BNA scaffold modification
  misc_feature (16)..(16): BNA scaffold modification
tgcccaaugccaucct

SEQ ID NO: 3557 - RNA, 16 nt, Artificial Sequence
  Antisense oligonucleotide
  misc_feature (1)..(2): BNA scaffold modification
  misc_feature (9)..(9): BNA scaffold modification
  misc_feature (16)..(16): BNA scaffold modification
tgcccaaugccaucct

SEQ ID NO: 3558 - RNA, 16 nt, Artificial Sequence
  Antisense oligonucleotide
  misc_feature (1)..(1): BNA scaffold modification
  misc_feature (5)..(5): BNA scaffold modification
  misc_feature (11)..(11): BNA scaffold modification
  misc_feature (14)..(14): BNA scaffold modification
  misc_feature (16)..(16): BNA scaffold modification
tgcccaaugccaucct

SEQ ID NO: 3559 - RNA, 16 nt, Artificial Sequence
  Antisense oligonucleotide
  misc_feature (1)..(2): BNA scaffold modification
  misc_feature (15)..(16): BNA scaffold modification
tgcccaaugccaucct

SEQ ID NO: 3560 - RNA, 16 nt, Artificial Sequence
  Antisense oligonucleotide
  misc_feature (1)..(2): BNA scaffold modification
  misc_feature (9)..(9): BNA scaffold modification
  misc_feature (15)..(16): BNA scaffold modification
tgcccaaugccaucct

SEQ ID NO: 3561 - RNA, 16 nt, Artificial Sequence
  Antisense oligonucleotide
  misc_feature (1)..(1): BNA scaffold modification
  misc_feature (16)..(16): BNA scaffold modification
gcccaaugccauccug

SEQ ID NO: 3562 - RNA, 16 nt, Artificial Sequence
  Antisense oligonucleotide
  misc_feature (1)..(1): BNA scaffold modification
  misc_feature (8)..(8): BNA scaffold modification
  misc_feature (16)..(16): BNA scaffold modification
gcccaaugccauccug

SEQ ID NO: 3563 - RNA, 16 nt, Artificial Sequence
  Antisense oligonucleotide
  misc_feature (1)..(1): BNA scaffold modification
  misc_feature (14)..(14): BNA scaffold modification
  misc_feature (16)..(16): BNA scaffold modification
gcccaaugccauccug

SEQ ID NO: 3564 - RNA, 16 nt, Artificial Sequence
  Antisense oligonucleotide
  misc_feature (1)..(1): BNA scaffold modification
  misc_feature (10)..(10): BNA scaffold modification
  misc_feature (16)..(16): BNA scaffold modification
gcccaaugccauccug

SEQ ID NO: 3565 - RNA, 16 nt, Artificial Sequence
  Antisense oligonucleotide
  misc_feature (1)..(1): BNA scaffold modification
  misc_feature (4)..(4): BNA scaffold modification
  misc_feature (16)..(16): BNA scaffold modification
gcccaaugccauccug

SEQ ID NO: 3566 - RNA, 16 nt, Artificial Sequence
  Antisense oligonucleotide
  misc_feature (1)..(1): BNA scaffold modification
  misc_feature (4)..(4): BNA scaffold modification
  misc_feature (13)..(13): BNA scaffold modification
  misc_feature (16)..(16): BNA scaffold modification
gcccaaugccauccug

SEQ ID NO: 3567 - RNA, 16 nt, Artificial Sequence
  Antisense oligonucleotide
  misc_feature (1)..(1): BNA scaffold modification
  misc_feature (8)..(8): BNA scaffold modification
  misc_feature (13)..(13): BNA scaffold modification
  misc_feature (16)..(16): BNA scaffold modification
gcccaaugccauccug

SEQ ID NO: 3568 - RNA, 16 nt, Artificial Sequence
  Antisense oligonucleotide
  misc_feature (1)..(1): BNA scaffold modification
  misc_feature (4)..(4): BNA scaffold modification
  misc_feature (8)..(8): BNA scaffold modification
  misc_feature (16)..(16): BNA scaffold modification
gcccaaugccauccug

SEQ ID NO: 3569 - RNA, 16 nt, Artificial Sequence
  Antisense oligonucleotide
  misc_feature (1)..(1): BNA scaffold modification
  misc_feature (4)..(4): BNA scaffold modification
  misc_feature (10)..(10): BNA scaffold modification
  misc_feature (16)..(16): BNA scaffold modification
gcccaaugccauccug

SEQ ID NO: 3570 - RNA, 16 nt, Artificial Sequence
  Antisense oligonucleotide
  misc_feature (1)..(2): BNA scaffold modification
  misc_feature (15)..(16): BNA scaffold modification
gcccaaugccaucctg

SEQ ID NO: 3571 - RNA, 16 nt, Artificial Sequence
  Antisense oligonucleotide
  misc_feature (1)..(2): BNA scaffold modification
  misc_feature (8)..(8): BNA scaffold modification
  misc_feature (15)..(16): BNA scaffold modification
gcccaaugccaucctg

SEQ ID NO: 3572 - RNA, 16 nt, Artificial Sequence
  Antisense oligonucleotide
  misc_feature (1)..(1): BNA scaffold modification
  misc_feature (10)..(10): BNA scaffold modification
  misc_feature (15)..(16): BNA scaffold modification
gcccaaugccaucctg

SEQ ID NO: 3573 - RNA, 24 nt, Artificial Sequence
  Antisense oligonucleotide
  misc_feature (1)..(1): BNA scaffold modification
  misc_feature (24)..(24): BNA scaffold modification
caggcuucccaauuuuuccuguag

SEQ ID NO: 3574 - RNA, 24 nt, Artificial Sequence
  Antisense oligonucleotide
  misc_feature (1)..(1): BNA scaffold modification
  misc_feature (3)..(3): BNA scaffold modification
  misc_feature (24)..(24): BNA scaffold modification
caggcuucccaauuuuuccuguag

SEQ ID NO: 3575 - RNA, 24 nt, Artificial Sequence
  Antisense oligonucleotide
  misc_feature (1)..(1): BNA scaffold modification
  misc_feature (4)..(4): BNA scaffold modification
  misc_feature (24)..(24): BNA scaffold modification
caggcuucccaauuuuuccuguag

SEQ ID NO: 3576 - RNA, 24 nt, Artificial Sequence
  Antisense oligonucleotide
  misc_feature (1)..(1): BNA scaffold modification
  misc_feature (21)..(21): BNA scaffold modification
  misc_feature (24)..(24): BNA scaffold modification
caggcuucccaauuuuuccuguag

SEQ ID NO: 3577 - RNA, 24 nt, Artificial Sequence
  Antisense oligonucleotide
  misc_feature (1)..(1): BNA scaffold modification
  misc_feature (3)..(3): BNA scaffold modification
  misc_feature (21)..(21): BNA scaffold modification
  misc_feature (24)..(24): BNA scaffold modification
caggcuucccaauuuuuccuguag

SEQ ID NO: 3578 - RNA, 24 nt, Artificial Sequence
  Antisense oligonucleotide
  misc_feature (1)..(1): BNA scaffold modification
  misc_feature (4)..(4): BNA scaffold modification
  misc_feature (21)..(21): BNA scaffold modification
  misc_feature (24)..(24): BNA scaffold modification
caggcuucccaauuuuuccuguag

SEQ ID NO: 3579 - RNA, 24 nt, Artificial Sequence
  Antisense oligonucleotide
  misc_feature (1)..(1): BNA scaffold modification
  misc_feature (5)..(5): BNA scaffold modification
  misc_feature (24)..(24): BNA scaffold modification
caggcuucccaauuuuuccuguag

SEQ ID NO: 3580 - RNA, 24 nt, Artificial Sequence
  Antisense oligonucleotide
  misc_feature (1)..(1): BNA scaffold modification
  misc_feature (8)..(8): BNA scaffold modification
  misc_feature (24)..(24): BNA scaffold modification
caggcuucccaauuuuuccuguag

SEQ ID NO: 3581 - RNA, 24 nt, Artificial Sequence
  Antisense oligonucleotide
  misc_feature (1)..(1): BNA scaffold modification
  misc_feature (10)..(10): BNA scaffold modification
  misc_feature (24)..(24): BNA scaffold modification
caggcuucccaauuuuuccuguag

SEQ ID NO: 3582 - RNA, 24 nt, Artificial Sequence
  Antisense oligonucleotide
  misc_feature (1)..(1): BNA scaffold modification
  misc_feature (18)..(18): BNA scaffold modification
  misc_feature (24)..(24): BNA scaffold modification
caggcuucccaauuuuuccuguag

SEQ ID NO: 3583 - RNA, 24 nt, Artificial Sequence
  Antisense oligonucleotide
  misc_feature (1)..(1): BNA scaffold modification
  misc_feature (19)..(19): BNA scaffold modification
  misc_feature (24)..(24): BNA scaffold modification
caggcuucccaauuuuuccuguag

SEQ ID NO: 3584 - RNA, 24 nt, Artificial Sequence
  Antisense oligonucleotide
  misc_feature (1)..(1): BNA scaffold modification
  misc_feature (5)..(5): BNA scaffold modification
  misc_feature (19)..(19): BNA scaffold modification
  misc_feature (24)..(24): BNA scaffold modification
caggcuucccaauuuuuccuguag

SEQ ID NO: 3585 - RNA, 24 nt, Artificial Sequence
  Antisense oligonucleotide
  misc_feature (1)..(1): BNA scaffold modification
  misc_feature (8)..(8): BNA scaffold modification
  misc_feature (18)..(18): BNA scaffold modification
  misc_feature (24)..(24): BNA scaffold modification
caggcuucccaauuuuuccuguag

SEQ ID NO: 3586 - RNA, 24 nt, Artificial Sequence
  Antisense oligonucleotide
  misc_feature (1)..(1): BNA scaffold modification
  misc_feature (5)..(5): BNA scaffold modification
  misc_feature (10)..(10): BNA scaffold modification
  misc_feature (19)..(19): BNA scaffold modification
  misc_feature (24)..(24): BNA scaffold modification
caggcuucccaauuuuuccuguag

SEQ ID NO: 3587 - RNA, 24 nt, Artificial Sequence
  Antisense oligonucleotide
  misc_feature (1)..(2): BNA scaffold modification
  misc_feature (23)..(24): BNA scaffold modification
caggcuucccaauuuuuccuguag

SEQ ID NO: 3588 - RNA, 24 nt, Artificial Sequence
  Antisense oligonucleotide
  misc_feature (1)..(2): BNA scaffold modification
  misc_feature (10)..(10): BNA scaffold modification
  misc_feature (18)..(18): BNA scaffold modification
  misc_feature (23)..(24): BNA scaffold modification
caggcuucccaauuuuuccuguag

SEQ ID NO: 3589 - RNA, 22 nt, Artificial Sequence
  Antisense oligonucleotide
  misc_feature (1)..(1): BNA scaffold modification
  misc_feature (22)..(22): BNA scaffold modification
caggcuucccaauuuuuccugt

SEQ ID NO: 3590 - RNA, 22 nt, Artificial Sequence
  Antisense oligonucleotide
  misc_feature (1)..(1): BNA scaffold modification
  misc_feature (3)..(3): BNA scaffold modification
  misc_feature (22)..(22): BNA scaffold modification
caggcuucccaauuuuuccugt

SEQ ID NO: 3591 - RNA, 22 nt, Artificial Sequence
  Antisense oligonucleotide
  misc_feature (1)..(1): BNA scaffold modification
  misc_feature (4)..(4): BNA scaffold modification
  misc_feature (22)..(22): BNA scaffold modification
caggcuucccaauuuuuccugt

SEQ ID NO: 3592 - RNA, 22 nt, Artificial Sequence
  Antisense oligonucleotide
  misc_feature (1)..(1): BNA scaffold modification
  misc_feature (21)..(22): BNA scaffold modification
caggcuucccaauuuuuccugt

SEQ ID NO: 3593 - RNA, 22 nt, Artificial Sequence
  Antisense oligonucleotide
  misc_feature (1)..(1): BNA scaffold modification
  misc_feature (3)..(3): BNA scaffold modification
  misc_feature (21)..(22): BNA scaffold modification
caggcuucccaauuuuuccugt

SEQ ID NO: 3594 - RNA, 22 nt, Artificial Sequence
  Antisense oligonucleotide
  misc_feature (1)..(1): BNA scaffold modification
  misc_feature (5)..(5): BNA scaffold modification
  misc_feature (22)..(22): BNA scaffold modification
caggcuucccaauuuuuccugt

SEQ ID NO: 3595 - RNA, 22 nt, Artificial Sequence
  Antisense oligonucleotide
  misc_feature (1)..(1): BNA scaffold modification
  misc_feature (8)..(8): BNA scaffold modification
  misc_feature (22)..(22): BNA scaffold modification
caggcuucccaauuuuuccugt

SEQ ID NO: 3596 - RNA, 22 nt, Artificial Sequence
  Antisense oligonucleotide
  misc_feature (1)..(1): BNA scaffold modification
  misc_feature (10)..(10): BNA scaffold modification
  misc_feature (22)..(22): BNA scaffold modification
caggcuucccaauuuuuccugt

SEQ ID NO: 3597 - RNA, 22 nt, Artificial Sequence
  Antisense oligonucleotide
  misc_feature (1)..(1): BNA scaffold modification
  misc_feature (19)..(19): BNA scaffold modification
  misc_feature (22)..(22): BNA scaffold modification
caggcuucccaauuuuuccugt

SEQ ID NO: 3598 - RNA, 22 nt, Artificial Sequence
  Antisense oligonucleotide
  misc_feature (1)..(1): BNA scaffold modification
  misc_feature (10)..(10): BNA scaffold modification
  misc_feature (18)..(18): BNA scaffold modification
  misc_feature (22)..(22): BNA scaffold modification
caggcuucccaauuuuuccugt

SEQ ID NO: 3599 - RNA, 22 nt, Artificial Sequence
  Antisense oligonucleotide
  misc_feature (1)..(1): BNA scaffold modification
  misc_feature (5)..(5): BNA scaffold modification
  misc_feature (10)..(10): BNA scaffold modification
  misc_feature (22)..(22): BNA scaffold modification
caggcuucccaauuuuuccugt

SEQ ID NO: 3600 - RNA, 22 nt, Artificial Sequence
  Antisense oligonucleotide
  misc_feature (1)..(1): BNA scaffold modification
  misc_feature (5)..(5): BNA scaffold modification
  misc_feature (10)..(10): BNA scaffold modification
  misc_feature (19)..(19): BNA scaffold modification
  misc_feature (22)..(22): BNA scaffold modification
caggcuucccaauuuuuccugt

SEQ ID NO: 3601 - RNA, 22 nt, Artificial Sequence
  Antisense oligonucleotide
  misc_feature (1)..(1): BNA scaffold modification
  misc_feature (3)..(3): BNA scaffold modification
  misc_feature (8)..(8): BNA scaffold modification
  misc_feature (18)..(18): BNA scaffold modification
  misc_feature (22)..(22): BNA scaffold modification
caggcuucccaauuuuuccugt

SEQ ID NO: 3602 - RNA, 22 nt, Artificial Sequence
  Antisense oligonucleotide
  misc_feature (1)..(2): BNA scaffold modification
  misc_feature (21)..(22): BNA scaffold modification
caggcuucccaauuuuuccugt

SEQ ID NO: 3603 - RNA, 22 nt, Artificial Sequence
  Antisense oligonucleotide
  misc_feature (1)..(2): BNA scaffold modification
  misc_feature (10)..(10): BNA scaffold modification
  misc_feature (21)..(22): BNA scaffold modification
caggcuucccaauuuuuccugt

SEQ ID NO: 3604 - RNA, 22 nt, Artificial Sequence
  Antisense oligonucleotide
  misc_feature (1)..(1): BNA scaffold modification
  misc_feature (22)..(22): BNA scaffold modification
aggcuucccaauuuuuccugua

SEQ ID NO: 3605 - RNA, 22 nt, Artificial Sequence
  Antisense oligonucleotide
  misc_feature (1)..(2): BNA scaffold modification
  misc_feature (22)..(22): BNA scaffold modification
aggcuucccaauuuuuccugua

SEQ ID NO: 3606 - RNA, 22 nt, Artificial Sequence
  Antisense oligonucleotide
  misc_feature (1)..(1): BNA scaffold modification
  misc_feature (3)..(3): BNA scaffold modification
  misc_feature (22)..(22): BNA scaffold modification
aggcuucccaauuuuuccugua

SEQ ID NO: 3607 - RNA, 22 nt, Artificial Sequence
  Antisense oligonucleotide
  misc_feature (1)..(1): BNA scaffold modification
  misc_feature (20)..(20): BNA scaffold modification
  misc_feature (22)..(22): BNA scaffold modification
aggcuucccaauuuuuccugua

SEQ ID NO: 3608 - RNA, 22 nt, Artificial Sequence
  Antisense oligonucleotide
  misc_feature (1)..(2): BNA scaffold modification
  misc_feature (20)..(20): BNA scaffold modification
  misc_feature (22)..(22): BNA scaffold modification
aggcuucccaauuuuuccugua

SEQ ID NO: 3609 - RNA, 22 nt, Artificial Sequence
  Antisense oligonucleotide
  misc_feature (1)..(1): BNA scaffold modification
  misc_feature (4)..(4): BNA scaffold modification
  misc_feature (22)..(22): BNA scaffold modification
aggcuucccaauuuuuccugua

SEQ ID NO: 3610 - RNA, 22 nt, Artificial Sequence
  Antisense oligonucleotide
  misc_feature (1)..(1): BNA scaffold modification
  misc_feature (9)..(9): BNA scaffold modification
  misc_feature (22)..(22): BNA scaffold modification
aggcuucccaauuuuuccugua

SEQ ID NO: 3611 - RNA, 22 nt, Artificial Sequence
  Antisense oligonucleotide
  misc_feature (1)..(1): BNA scaffold modification
  misc_feature (18)..(18): BNA scaffold modification
  misc_feature (22)..(22): BNA scaffold modification
aggcuucccaauuuuuccugua

SEQ ID NO: 3612 - RNA, 22 nt, Artificial Sequence
  Antisense oligonucleotide
  misc_feature (1)..(1): BNA scaffold modification
  misc_feature (7)..(7): BNA scaffold modification
  misc_feature (17)..(17): BNA scaffold modification
  misc_feature (22)..(22): BNA scaffold modification
aggcuucccaauuuuuccugua

SEQ ID NO: 3613 - RNA, 22 nt, Artificial Sequence
  Antisense oligonucleotide
  misc_feature (1)..(1): BNA scaffold modification
  misc_feature (22)..(22): BNA scaffold modification
aggcuucccaauuuuuccugua

SEQ ID NO: 3614 - RNA, 22 nt, Artificial Sequence
  Antisense oligonucleotide
  misc_feature (1)..(1): BNA scaffold modification
  misc_feature (4)..(4): BNA scaffold modification
  misc_feature (9)..(9): BNA scaffold modification
  misc_feature (18)..(18): BNA scaffold modification
  misc_feature (22)..(22): BNA scaffold modification
aggcuucccaauuuuuccugua

SEQ ID NO: 3615 - RNA, 22 nt, Artificial Sequence
  Antisense oligonucleotide
  misc_feature (1)..(2): BNA scaffold modification
  misc_feature (21)..(22): BNA scaffold modification
aggcuucccaauuuuuccugta

SEQ ID NO: 3616 - RNA, 22 nt, Artificial Sequence
  Antisense oligonucleotide
  misc_feature (1)..(2): BNA scaffold modification
  misc_feature (9)..(9): BNA scaffold modification
  misc_feature (21)..(22): BNA scaffold modification
aggcuucccaauuuuuccugta

SEQ ID NO: 3617 - RNA, 22 nt, Artificial Sequence
  Antisense oligonucleotide
  misc_feature (1)..(1): BNA scaffold modification
  misc_feature (22)..(22): BNA scaffold modification
ggcuucccaauuuuuccuguag

SEQ ID NO: 3618 - RNA, 22 nt, Artificial Sequence
  Antisense oligonucleotide
  misc_feature (1)..(2): BNA scaffold modification
  misc_feature (22)..(22): BNA scaffold modification
ggcuucccaauuuuuccuguag

SEQ ID NO: 3619 - RNA, 22 nt, Artificial Sequence
  Antisense oligonucleotide
  misc_feature (1)..(1): BNA scaffold modification
  misc_feature (19)..(19): BNA scaffold modification
  misc_feature (22)..(22): BNA scaffold modification
ggcuucccaauuuuuccuguag

SEQ ID NO: 3620 - RNA, 22 nt, Artificial Sequence
  Antisense oligonucleotide
  misc_feature (1)..(2): BNA scaffold modification
  misc_feature (19)..(19): BNA scaffold modification
  misc_feature (22)..(22): BNA scaffold modification
ggcuucccaauuuuuccuguag

SEQ ID NO: 3621 - RNA, 22 nt, Artificial Sequence
  Antisense oligonucleotide
  misc_feature (1)..(1): BNA scaffold modification
  misc_feature (17)..(17): BNA scaffold modification
  misc_feature (22)..(22): BNA scaffold modification
ggcuucccaauuuuuccuguag

SEQ ID NO: 3622 - RNA, 22 nt, Artificial Sequence
  Antisense oligonucleotide
  misc_feature (1)..(1): BNA scaffold modification
  misc_feature (8)..(8): BNA scaffold modification
  misc_feature (22)..(22): BNA scaffold modification
ggcuucccaauuuuuccuguag

SEQ ID NO: 3623 - RNA, 22 nt, Artificial Sequence
  Antisense oligonucleotide
  misc_feature (1)..(1): BNA scaffold modification
  misc_feature (3)..(3): BNA scaffold modification
  misc_feature (22)..(22): BNA scaffold modification
ggcuucccaauuuuuccuguag

SEQ ID NO: 3624 - RNA, 22 nt, Artificial Sequence
  Antisense oligonucleotide
  misc_feature (1)..(1): BNA scaffold modification
  misc_feature (6)..(6): BNA scaffold modification
  misc_feature (16)..(16): BNA scaffold modification
  misc_feature (22)..(22): BNA scaffold modification
ggcuucccaauuuuuccuguag

SEQ ID NO: 3625 - RNA, 22 nt, Artificial Sequence
  Antisense oligonucleotide
  misc_feature (1)..(1): BNA scaffold modification
  misc_feature (8)..(8): BNA scaffold modification
  misc_feature (17)..(17): BNA scaffold modification
  misc_feature (22)..(22): BNA scaffold modification
ggcuucccaauuuuuccuguag

SEQ ID NO: 3626 - RNA, 22 nt, Artificial Sequence
  Antisense oligonucleotide
  misc_feature (1)..(1): BNA scaffold modification
  misc_feature (3)..(3): BNA scaffold modification
  misc_feature (8)..(8): BNA scaffold modification
  misc_feature (17)..(17): BNA scaffold modification
  misc_feature (22)..(22): BNA scaffold modification
ggcuucccaauuuuuccuguag

SEQ ID NO: 3627 - RNA, 22 nt, Artificial Sequence
  Antisense oligonucleotide
  misc_feature (1)..(2): BNA scaffold modification
  misc_feature (21)..(22): BNA scaffold modification
ggcuucccaauuuuuccuguag

SEQ ID NO: 3628 - RNA, 22 nt, Artificial Sequence
  Antisense oligonucleotide
  misc_feature (1)..(2): BNA scaffold modification
  misc_feature (8)..(8): BNA scaffold modification
  misc_feature (16)..(16): BNA scaffold modification
  misc_feature (21)..(22): BNA scaffold modification
ggcuucccaauuuuuccuguag

SEQ ID NO: 3629 - RNA, 20 nt, Artificial Sequence
  Antisense oligonucleotide
  misc_feature (1)..(1): BNA scaffold modification
  misc_feature (20)..(20): BNA scaffold modification
caggcuucccaauuuuucct

SEQ ID NO: 3630 - RNA, 20 nt, Artificial Sequence
  Antisense oligonucleotide
  misc_feature (1)..(1): BNA scaffold modification
  misc_feature (3)..(3): BNA scaffold modification
  misc_feature (20)..(20): BNA scaffold modification
caggcuucccaauuuuucct

SEQ ID NO: 3631 - RNA, 20 nt, Artificial Sequence
  Antisense oligonucleotide
  misc_feature (1)..(1): BNA scaffold modification
  misc_feature (4)..(4): BNA scaffold modification
  misc_feature (20)..(20): BNA scaffold modification
caggcuucccaauuuuucct

SEQ ID NO: 3632 - RNA, 20 nt, Artificial Sequence
  Antisense oligonucleotide
  misc_feature (1)..(1): BNA scaffold modification
  misc_feature (5)..(5): BNA scaffold modification
  misc_feature (20)..(20): BNA scaffold modification
caggcuucccaauuuuucct

SEQ ID NO: 3633 - RNA, 20 nt, Artificial Sequence
  Antisense oligonucleotide
  misc_feature (1)..(1): BNA scaffold modification
  misc_feature (8)..(8): BNA scaffold modification
  misc_feature (20)..(20): BNA scaffold modification
caggcuucccaauuuuucct

SEQ ID NO: 3634 - RNA, 20 nt, Artificial Sequence
  Antisense oligonucleotide
  misc_feature (1)..(1): BNA scaffold modification
  misc_feature (10)..(10): BNA scaffold modification
  misc_feature (20)..(20): BNA scaffold modification
caggcuucccaauuuuucct

SEQ ID NO: 3635 - RNA, 20 nt, Artificial Sequence
  Antisense oligonucleotide
  misc_feature (1)..(1): BNA scaffold modification
  misc_feature (18)..(18): BNA scaffold modification
  misc_feature (20)..(20): BNA scaffold modification
caggcuucccaauuuuucct

SEQ ID NO: 3636 - RNA, 20 nt, Artificial Sequence
  Antisense oligonucleotide
  misc_feature (1)..(1): BNA scaffold modification
  misc_feature (5)..(5): BNA scaffold modification
  misc_feature (18)..(18): BNA scaffold modification
  misc_feature (20)..(20): BNA scaffold modification
caggcuucccaauuuuucct

SEQ ID NO: 3637 - RNA, 20 nt, Artificial Sequence
  Antisense oligonucleotide
  misc_feature (1)..(1): BNA scaffold modification
  misc_feature (5)..(5): BNA scaffold modification
  misc_feature (10)..(10): BNA scaffold modification
  misc_feature (20)..(20): BNA scaffold modification
caggcuucccaauuuuucct

SEQ ID NO: 3638 - RNA, 20 nt, Artificial Sequence
  Antisense oligonucleotide
  misc_feature (1)..(1): BNA scaffold modification
  misc_feature (4)..(4): BNA scaffold modification
  misc_feature (18)..(18): BNA scaffold modification
  misc_feature (20)..(20): BNA scaffold modification
caggcuucccaauuuuucct

SEQ ID NO: 3639 - RNA, 20 nt, Artificial Sequence
  Antisense oligonucleotide
  misc_feature (1)..(2): BNA scaffold modification
  misc_feature (19)..(20): BNA scaffold modification
caggcuucccaauuuuucct

SEQ ID NO: 3640 - RNA, 20 nt, Artificial Sequence
  Antisense oligonucleotide
  misc_feature (1)..(2): BNA scaffold modification
  misc_feature (10)..(10): BNA scaffold modification
  misc_feature (19)..(20): BNA scaffold modification
caggcuucccaauuuuucct

SEQ ID NO: 3641 - RNA, 20 nt, Artificial Sequence
  Antisense oligonucleotide
  misc_feature (1)..(1): BNA scaffold modification
  misc_feature (20)..(20): BNA scaffold modification
aggcuucccaauuuuuccug

SEQ ID NO: 3642 - RNA, 20 nt, Artificial Sequence
  Antisense oligonucleotide
  misc_feature (1)..(2): BNA scaffold modification
  misc_feature (20)..(20): BNA scaffold modification
aggcuucccaauuuuuccug

SEQ ID NO: 3643 - RNA, 20 nt, Artificial Sequence
  Antisense oligonucleotide
  misc_feature (1)..(1): BNA scaffold modification
  misc_feature (3)..(3): BNA scaffold modification
  misc_feature (20)..(20): BNA scaffold modification
aggcuucccaauuuuuccug

SEQ ID NO: 3644 - RNA, 20 nt, Artificial Sequence
  Antisense oligonucleotide
  misc_feature (1)..(1): BNA scaffold modification
  misc_feature (4)..(4): BNA scaffold modification
  misc_feature (20)..(20): BNA scaffold modification
aggcuucccaauuuuuccug

SEQ ID NO: 3645 - RNA, 20 nt, Artificial Sequence
  Antisense oligonucleotide
  misc_feature (1)..(1): BNA scaffold modification
  misc_feature (7)..(7): BNA scaffold modification
  misc_feature (20)..(20): BNA scaffold modification
aggcuucccaauuuuuccug

SEQ ID NO: 3646 - RNA, 20 nt, Artificial Sequence
  Antisense oligonucleotide
  misc_feature (1)..(1): BNA scaffold modification
  misc_feature (9)..(9): BNA scaffold modification
  misc_feature (20)..(20): BNA scaffold modification
aggcuucccaauuuuuccug

SEQ ID NO: 3647 - RNA, 20 nt, Artificial Sequence
  Antisense oligonucleotide
  misc_feature (1)..(1): BNA scaffold modification
  misc_feature (17)..(17): BNA scaffold modification
  misc_feature (20)..(20): BNA scaffold modification
aggcuucccaauuuuuccug

SEQ ID NO: 3648 - RNA, 20 nt, Artificial Sequence
  Antisense oligonucleotide
  misc_feature (1)..(1): BNA scaffold modification
  misc_feature (9)..(9): BNA scaffold modification
  misc_feature (18)..(18): BNA scaffold modification
  misc_feature (20)..(20): BNA scaffold modification
aggcuucccaauuuuuccug

SEQ ID NO: 3649 - RNA, 20 nt, Artificial Sequence
  Antisense oligonucleotide
  misc_feature (1)..(1): BNA scaffold modification
  misc_feature (4)..(4): BNA scaffold modification
  misc_feature (9)..(9): BNA scaffold modification
  misc_feature (20)..(20): BNA scaffold modification
aggcuucccaauuuuuccug

SEQ ID NO: 3650 - RNA, 20 nt, Artificial Sequence
  Antisense oligonucleotide
  misc_feature (1)..(1): BNA scaffold modification
  misc_feature (3)..(3): BNA scaffold modification
  misc_feature (17)..(17): BNA scaffold modification
  misc_feature (20)..(20): BNA scaffold modification
aggcuucccaauuuuuccug

SEQ ID NO: 3651 - RNA, 20 nt, Artificial Sequence
  Antisense oligonucleotide
  misc_feature (1)..(2): BNA scaffold modification
  misc_feature (19)..(20): BNA scaffold modification
aggcuucccaauuuuucctg

SEQ ID NO: 3652 - RNA, 20 nt, Artificial Sequence
  Antisense oligonucleotide
  misc_feature (1)..(2): BNA scaffold modification
  misc_feature (9)..(9): BNA scaffold modification
  misc_feature (19)..(20): BNA scaffold modification
aggcuucccaauuuuucctg

SEQ ID NO: 3653 - RNA, 20 nt, Artificial Sequence
  Antisense oligonucleotide
  misc_feature (1)..(1): BNA scaffold modification
  misc_feature (20)..(20): BNA scaffold modification
ggcuucccaauuuuuccugt

SEQ ID NO: 3654 - RNA, 20 nt, Artificial Sequence
  Antisense oligonucleotide
  misc_feature (1)..(2): BNA scaffold modification
  misc_feature (20)..(20): BNA scaffold modification
ggcuucccaauuuuuccugt

SEQ ID NO: 3655 - RNA, 20 nt, Artificial Sequence
  Antisense oligonucleotide
  misc_feature (1)..(1): BNA scaffold modification
  misc_feature (19)..(20): BNA scaffold modification
ggcuucccaauuuuuccugt

SEQ ID NO: 3656 - RNA, 20 nt, Artificial Sequence
  Antisense oligonucleotide
  misc_feature (1)..(2): BNA scaffold modification
  misc_feature (19)..(20): BNA scaffold modification
ggcuucccaauuuuuccugt

SEQ ID NO: 3657 - RNA, 20 nt, Artificial Sequence
  Antisense oligonucleotide
  misc_feature (1)..(1): BNA scaffold modification
  misc_feature (3)..(3): BNA scaffold modification
  misc_feature (20)..(20): BNA scaffold modification
ggcuucccaauuuuuccugt

SEQ ID NO: 3658 - RNA, 20 nt, Artificial Sequence
  Antisense oligonucleotide
  misc_feature (1)..(1): BNA scaffold modification
  misc_feature (6)..(6): BNA scaffold modification
  misc_feature (20)..(20): BNA scaffold modification
ggcuucccaauuuuuccugt

SEQ ID NO: 3659 - RNA, 20 nt, Artificial Sequence
  Antisense oligonucleotide
  misc_feature (1)..(1): BNA scaffold modification
  misc_feature (8)..(8): BNA scaffold modification
  misc_feature (20)..(20): BNA scaffold modification
ggcuucccaauuuuuccugt

SEQ ID NO: 3660 - RNA, 20 nt, Artificial Sequence
  Antisense oligonucleotide
  misc_feature (1)..(1): BNA scaffold modification
  misc_feature (16)..(16): BNA scaffold modification
  misc_feature (20)..(20): BNA scaffold modification
ggcuucccaauuuuuccugt

SEQ ID NO: 3661 - RNA, 20 nt, Artificial Sequence
  Antisense oligonucleotide
  misc_feature (1)..(1): BNA scaffold modification
  misc_feature (8)..(8): BNA scaffold modification
  misc_feature (17)..(17): BNA scaffold modification
  misc_feature (20)..(20): BNA scaffold modification
ggcuucccaauuuuuccugt

SEQ ID NO: 3662 - RNA, 20 nt, Artificial Sequence
  Antisense oligonucleotide
  misc_feature (1)..(1): BNA scaffold modification
  misc_feature (3)..(3): BNA scaffold modification
  misc_feature (6)..(6): BNA scaffold modification
  misc_feature (16)..(16): BNA scaffold modification
  misc_feature (20)..(20): BNA scaffold modification
ggcuucccaauuuuuccugt

SEQ ID NO: 3663 - RNA, 20 nt, Artificial Sequence
  Antisense oligonucleotide
  misc_feature (1)..(2): BNA scaffold modification
  misc_feature (8)..(8): BNA scaffold modification
  misc_feature (19)..(20): BNA scaffold modification
ggcuucccaauuuuuccugt

SEQ ID NO: 3664 - RNA, 20 nt, Artificial Sequence
  Antisense oligonucleotide
  misc_feature (1)..(1): BNA scaffold modification
  misc_feature (20)..(20): BNA scaffold modification
gcuucccaauuuuuccugua

SEQ ID NO: 3665 - RNA, 20 nt, Artificial Sequence
  Antisense oligonucleotide
  misc_feature (1)..(1): BNA scaffold modification
  misc_feature (18)..(18): BNA scaffold modification
  misc_feature (20)..(20): BNA scaffold modification
gcuucccaauuuuuccugua

SEQ ID NO: 3666 - RNA, 20 nt, Artificial Sequence
  Antisense oligonucleotide
  misc_feature (1)..(1): BNA scaffold modification
  misc_feature (16)..(16): BNA scaffold modification
  misc_feature (20)..(20): BNA scaffold modification
gcuucccaauuuuuccugua

SEQ ID NO: 3667 - RNA, 20 nt, Artificial Sequence
  Antisense oligonucleotide
  misc_feature (1)..(1): BNA scaffold modification
  misc_feature (15)..(15): BNA scaffold modification
  misc_feature (20)..(20): BNA scaffold modification
gcuucccaauuuuuccugua

SEQ ID NO: 3668 - RNA, 20 nt, Artificial Sequence
  Antisense oligonucleotide
  misc_feature (1)..(1): BNA scaffold modification
  misc_feature (7)..(7): BNA scaffold modification
  misc_feature (20)..(20): BNA scaffold modification
gcuucccaauuuuuccugua

SEQ ID NO: 3669 - RNA, 20 nt, Artificial Sequence
  Antisense oligonucleotide
  misc_feature (1)..(1): BNA scaffold modification
  misc_feature (5)..(5): BNA scaffold modification
  misc_feature (20)..(20): BNA scaffold modification
gcuucccaauuuuuccugua

SEQ ID NO: 3670 - RNA, 20 nt, Artificial Sequence
  Antisense oligonucleotide
  misc_feature (1)..(2): BNA scaffold modification
  misc_feature (20)..(20): BNA scaffold modification
gcuucccaauuuuuccugua

SEQ ID NO: 3671 - RNA, 20 nt, Artificial Sequence
  Antisense oligonucleotide
  misc_feature (1)..(2): BNA scaffold modification
  misc_feature (7)..(7): BNA scaffold modification
  misc_feature (16)..(16): BNA scaffold modification
  misc_feature (20)..(20): BNA scaffold modification
gcuucccaauuuuuccugua

SEQ ID NO: 3672 - RNA, 20 nt, Artificial Sequence
  Antisense oligonucleotide
  misc_feature (1)..(1): BNA scaffold modification
  misc_feature (5)..(5): BNA scaffold modification
  misc_feature (15)..(15): BNA scaffold modification
  misc_feature (20)..(20): BNA scaffold modification
gcuucccaauuuuuccugua

SEQ ID NO: 3673 - RNA, 20 nt, Artificial Sequence
  Antisense oligonucleotide
  misc_feature (1)..(2): BNA scaffold modification
  misc_feature (19)..(20): BNA scaffold modification
gcuucccaauuuuuccugta

SEQ ID NO: 3674 - RNA, 20 nt, Artificial Sequence
  Antisense oligonucleotide
  misc_feature (1)..(2): BNA scaffold modification
  misc_feature (7)..(7): BNA scaffold modification
  misc_feature (15)..(15): BNA scaffold modification
  misc_feature (19)..(20): BNA scaffold modification
gcuucccaauuuuuccugta

SEQ ID NO: 3675 - RNA, 20 nt, Artificial Sequence
  Antisense oligonucleotide
  misc_feature (1)..(1): BNA scaffold modification
  misc_feature (20)..(20): BNA scaffold modification
cuucccaauuuuuccuguag

SEQ ID NO: 3676 - RNA, 20 nt, Artificial Sequence
  Antisense oligonucleotide
  misc_feature (1)..(1): BNA scaffold modification
  misc_feature (20)..(20): BNA scaffold modification
cuucccaauuuuuccuguag

SEQ ID NO: 3677 - RNA, 20 nt, Artificial Sequence
  Antisense oligonucleotide
  misc_feature (1)..(1): BNA scaffold modification
  misc_feature (17)..(17): BNA scaffold modification
  misc_feature (20)..(20): BNA scaffold modification
cuucccaauuuuuccuguag

SEQ ID NO: 3678 - RNA, 20 nt, Artificial Sequence
  Antisense oligonucleotide
  misc_feature (1)..(1): BNA scaffold modification
  misc_feature (15)..(15): BNA scaffold modification
  misc_feature (20)..(20): BNA scaffold modification
cuucccaauuuuuccuguag

SEQ ID NO: 3679 - RNA, 20 nt, Artificial Sequence
  Antisense oligonucleotide
  misc_feature (1)..(1): BNA scaffold modification
  misc_feature (6)..(6): BNA scaffold modification
  misc_feature (20)..(20): BNA scaffold modification
cuucccaauuuuuccuguag

SEQ ID NO: 3680 - RNA, 20 nt, Artificial Sequence
  Antisense oligonucleotide
  misc_feature (1)..(1): BNA scaffold modification
  misc_feature (4)..(4): BNA scaffold modification
  misc_feature (20)..(20): BNA scaffold modification
cuucccaauuuuuccuguag

SEQ ID NO: 3681 - RNA, 20 nt, Artificial Sequence
  Antisense oligonucleotide
  misc_feature (1)..(1): BNA scaffold modification
  misc_feature (14)..(14): BNA scaffold modification
  misc_feature (20)..(20): BNA scaffold modification
cuucccaauuuuuccuguag

SEQ ID NO: 3682 - RNA, 20 nt, Artificial Sequence
  Antisense oligonucleotide
  misc_feature (1)..(1): BNA scaffold modification
  misc_feature (4)..(4): BNA scaffold modification
  misc_feature (14)..(14): BNA scaffold modification
  misc_feature (20)..(20): BNA scaffold modification
cuucccaauuuuuccuguag

SEQ ID NO: 3683 - RNA, 20 nt, Artificial Sequence
  Antisense oligonucleotide
  misc_feature (1)..(1): BNA scaffold modification
  misc_feature (6)..(6): BNA scaffold modification
  misc_feature (15)..(15): BNA scaffold modification
  misc_feature (20)..(20): BNA scaffold modification
cuucccaauuuuuccuguag

SEQ ID NO: 3684 - RNA, 20 nt, Artificial Sequence
  Antisense oligonucleotide
  misc_feature (1)..(1): BNA scaffold modification
  misc_feature (6)..(6): BNA scaffold modification
  misc_feature (17)..(17): BNA scaffold modification
  misc_feature (20)..(20): BNA scaffold modification
cuucccaauuuuuccuguag

SEQ ID NO: 3685 - RNA, 20 nt, Artificial Sequence
  Antisense oligonucleotide
  misc_feature (1)..(2): BNA scaffold modification
  misc_feature (19)..(20): BNA scaffold modification
ctucccaauuuuuccuguag

SEQ ID NO: 3686 - RNA, 20 nt, Artificial Sequence
  Antisense oligonucleotide
  misc_feature (1)..(2): BNA scaffold modification
  misc_feature (6)..(6): BNA scaffold modification
  misc_feature (14)..(14): BNA scaffold modification
  misc_feature (19)..(20): BNA scaffold modification
ctucccaauuuuuccuguag

SEQ ID NO: 3687 - RNA, 18 nt, Artificial Sequence
  Antisense oligonucleotide
  misc_feature (1)..(1): BNA scaffold modification
  misc_feature (18)..(18): BNA scaffold modification
caggcuucccaauuuuuc

SEQ ID NO: 3688 - RNA, 18 nt, Artificial Sequence
  Antisense oligonucleotide
  misc_feature (1)..(1): BNA scaffold modification
  misc_feature (3)..(3): BNA scaffold modification
  misc_feature (18)..(18): BNA scaffold modification
caggcuucccaauuuuuc

SEQ ID NO: 3689 - RNA, 18 nt, Artificial Sequence
  Antisense oligonucleotide
  misc_feature (1)..(1): BNA scaffold modification
  misc_feature (4)..(4): BNA scaffold modification
  misc_feature (18)..(18): BNA scaffold modification
caggcuucccaauuuuuc

SEQ ID NO: 3690 - RNA, 18 nt, Artificial Sequence
  Antisense oligonucleotide
  misc_feature (1)..(1): BNA scaffold modification
  misc_feature (5)..(5): BNA scaffold modification
  misc_feature (18)..(18): BNA scaffold modification
caggcuucccaauuuuuc

SEQ ID NO: 3691 - RNA, 18 nt, Artificial Sequence
  Antisense oligonucleotide
  misc_feature (1)..(1): BNA scaffold modification
  misc_feature (8)..(8): BNA scaffold modification
  misc_feature (18)..(18): BNA scaffold modification
caggcuucccaauuuuuc

SEQ ID NO: 3692 - RNA, 18 nt, Artificial Sequence
  Antisense oligonucleotide
  misc_feature (1)..(1): BNA scaffold modification
  misc_feature (10)..(10): BNA scaffold modification
  misc_feature (18)..(18): BNA scaffold modification
caggcuucccaauuuuuc

SEQ ID NO: 3693 - RNA, 18 nt, Artificial Sequence
  Antisense oligonucleotide
  misc_feature (1)..(1): BNA scaffold modification
  misc_feature (5)..(5): BNA scaffold modification
  misc_feature (10)..(10): BNA scaffold modification
  misc_feature (18)..(18): BNA scaffold modification
caggcuucccaauuuuuc

SEQ ID NO: 3694 - RNA, 18 nt, Artificial Sequence
  Antisense oligonucleotide
  misc_feature (1)..(1): BNA scaffold modification
  misc_feature (3)..(3): BNA scaffold modification
  misc_feature (8)..(8): BNA scaffold modification
  misc_feature (18)..(18): BNA scaffold modification
caggcuucccaauuuuuc

SEQ ID NO: 3695 - RNA, 18 nt, Artificial Sequence
  Antisense oligonucleotide
  misc_feature (1)..(2): BNA scaffold modification
  misc_feature (17)..(18): BNA scaffold modification
caggcuucccaauuuutc

SEQ ID NO: 3696 - RNA, 18 nt, Artificial Sequence
  Antisense oligonucleotide
  misc_feature (1)..(2): BNA scaffold modification
  misc_feature (10)..(10): BNA scaffold modification
  misc_feature (17)..(18): BNA scaffold modification
caggcuucccaauuuutc

SEQ ID NO: 3697 - RNA, 18 nt, Artificial Sequence
  Antisense oligonucleotide
  misc_feature (1)..(2): BNA scaffold modification
  misc_feature (8)..(8): BNA scaffold modification
  misc_feature (17)..(18): BNA scaffold modification
caggcuucccaauuuutc

SEQ ID NO: 3698 - RNA, 18 nt, Artificial Sequence
  Antisense oligonucleotide
  misc_feature (1)..(1): BNA scaffold modification
  misc_feature (18)..(18): BNA scaffold modification
aggcuucccaauuuuucc

SEQ ID NO: 3699 - RNA, 18 nt, Artificial Sequence
  Antisense oligonucleotide
  misc_feature (1)..(2): BNA scaffold modification
  misc_feature (18)..(18): BNA scaffold modification
aggcuucccaauuuuucc

SEQ ID NO: 3700 - RNA, 18 nt, Artificial Sequence
  Antisense oligonucleotide
  misc_feature (1)..(1): BNA scaffold modification
  misc_feature (3)..(3): BNA scaffold modification
  misc_feature (18)..(18): BNA scaffold modification
aggcuucccaauuuuucc

SEQ ID NO: 3701 - RNA, 18 nt, Artificial Sequence
  Antisense oligonucleotide
  misc_feature (1)..(1): BNA scaffold modification
  misc_feature (4)..(4): BNA scaffold modification
  misc_feature (18)..(18): BNA scaffold modification
aggcuucccaauuuuucc

SEQ ID NO: 3702 - RNA, 18 nt, Artificial Sequence
  Antisense oligonucleotide
  misc_feature (1)..(1): BNA scaffold modification
  misc_feature (7)..(7): BNA scaffold modification
  misc_feature (18)..(18): BNA scaffold modification
aggcuucccaauuuuucc

SEQ ID NO: 3703 - RNA, 18 nt, Artificial Sequence
  Antisense oligonucleotide
  misc_feature (1)..(1): BNA scaffold modification
  misc_feature (9)..(9): BNA scaffold modification
  misc_feature (18)..(18): BNA scaffold modification
aggcuucccaauuuuucc

SEQ ID NO: 3704 - RNA, 18 nt, Artificial Sequence
  Antisense oligonucleotide
  misc_feature (1)..(1): BNA scaffold modification
  misc_feature (17)..(18): BNA scaffold modification
aggcuucccaauuuuucc

SEQ ID NO: 3705 - RNA, 18 nt, Artificial Sequence
  Antisense oligonucleotide
  misc_feature (1)..(1): BNA scaffold modification
  misc_feature (4)..(4): BNA scaffold modification
  misc_feature (9)..(9): BNA scaffold modification
  misc_feature (18)..(18): BNA scaffold modification
aggcuucccaauuuuucc

SEQ ID NO: 3706 - RNA, 18 nt, Artificial Sequence
  Antisense oligonucleotide
  misc_feature (1)..(2): BNA scaffold modification
  misc_feature (7)..(7): BNA scaffold modification
  misc_feature (18)..(18): BNA scaffold modification
aggcuucccaauuuuucc

SEQ ID NO: 3707 - RNA, 18 nt, Artificial Sequence
  Antisense oligonucleotide
  misc_feature (1)..(2): BNA scaffold modification
  misc_feature (17)..(18): BNA scaffold modification
aggcuucccaauuuuucc

SEQ ID NO: 3708 - RNA, 18 nt, Artificial Sequence
  Antisense oligonucleotide
  misc_feature (1)..(2): BNA scaffold modification
  misc_feature (9)..(9): BNA scaffold modification
  misc_feature (17)..(18): BNA scaffold modification
aggcuucccaauuuuucc

SEQ ID NO: 3709 - RNA, 18 nt, Artificial Sequence
  Antisense oligonucleotide
  misc_feature (1)..(1): BNA scaffold modification
  misc_feature (18)..(18): BNA scaffold modification
ggcuucccaauuuuucct

SEQ ID NO: 3710 - RNA, 18 nt, Artificial Sequence
  Antisense oligonucleotide
  misc_feature (1)..(2): BNA scaffold modification
  misc_feature (18)..(18): BNA scaffold modification
ggcuucccaauuuuucct

SEQ ID NO: 3711 - RNA, 18 nt, Artificial Sequence
  Antisense oligonucleotide
  misc_feature (1)..(1): BNA scaffold modification
  misc_feature (3)..(3): BNA scaffold modification
  misc_feature (18)..(18): BNA scaffold modification
ggcuucccaauuuuucct

SEQ ID NO: 3712 - RNA, 18 nt, Artificial Sequence
  Antisense oligonucleotide
  misc_feature (1)..(1): BNA scaffold modification
  misc_feature (6)..(6): BNA scaffold modification
  misc_feature (18)..(18): BNA scaffold modification
ggcuucccaauuuuucct

SEQ ID NO: 3713 - RNA, 18 nt, Artificial Sequence
  Antisense oligonucleotide
  misc_feature (1)..(1): BNA scaffold modification
  misc_feature (8)..(8): BNA scaffold modification
  misc_feature (18)..(18): BNA scaffold modification
ggcuucccaauuuuucct

SEQ ID NO: 3714 - RNA, 18 nt, Artificial Sequence
  Antisense oligonucleotide
  misc_feature (1)..(1): BNA scaffold modification
  misc_feature (16)..(16): BNA scaffold modification
  misc_feature (18)..(18): BNA scaffold modification
ggcuucccaauuuuucct

SEQ ID NO: 3715 - RNA, 18 nt, Artificial Sequence
  Antisense oligonucleotide
  misc_feature (1)..(1): BNA scaffold modification
  misc_feature (6)..(6): BNA scaffold modification
  misc_feature (16)..(16): BNA scaffold modification
  misc_feature (18)..(18): BNA scaffold modification
ggcuucccaauuuuucct

SEQ ID NO: 3716 - RNA, 18 nt, Artificial Sequence
  Antisense oligonucleotide
  misc_feature (1)..(1): BNA scaffold modification
  misc_feature (3)..(3): BNA scaffold modification
  misc_feature (8)..(8): BNA scaffold modification
  misc_feature (18)..(18): BNA scaffold modification
ggcuucccaauuuuucct

SEQ ID NO: 3717 - RNA, 18 nt, Artificial Sequence
  Antisense oligonucleotide
  misc_feature (1)..(1): BNA scaffold modification
  misc_feature (8)..(8): BNA scaffold modification
  misc_feature (17)..(18): BNA scaffold modification
ggcuucccaauuuuucct

SEQ ID NO: 3718 - RNA, 18 nt, Artificial Sequence
  Antisense oligonucleotide
  misc_feature (1)..(2): BNA scaffold modification
  misc_feature (8)..(8): BNA scaffold modification
  misc_feature (18)..(18): BNA scaffold modification
ggcuucccaauuuuucct

SEQ ID NO: 3719 - RNA, 18 nt, Artificial Sequence
  Antisense oligonucleotide
  misc_feature (1)..(2): BNA scaffold modification
  misc_feature (17)..(18): BNA scaffold modification
ggcuucccaauuuuucct

SEQ ID NO: 3720 - RNA, 18 nt, Artificial Sequence
  Antisense oligonucleotide
  misc_feature (1)..(1): BNA scaffold modification
  misc_feature (18)..(18): BNA scaffold modification
gcuucccaauuuuuccug

SEQ ID NO: 3721 - RNA, 18 nt, Artificial Sequence
  Antisense oligonucleotide
  misc_feature (1)..(2): BNA scaffold modification
  misc_feature (18)..(18): BNA scaffold modification
gcuucccaauuuuuccug

SEQ ID NO: 3722 - RNA, 18 nt, Artificial Sequence
  Antisense oligonucleotide
  misc_feature (1)..(1): BNA scaffold modification
  misc_feature (5)..(5): BNA scaffold modification
  misc_feature (18)..(18): BNA scaffold modification
gcuucccaauuuuuccug

SEQ ID NO: 3723 - RNA, 18 nt, Artificial Sequence
  Antisense oligonucleotide
  misc_feature (1)..(1): BNA scaffold modification
  misc_feature (7)..(7): BNA scaffold modification
  misc_feature (18)..(18): BNA scaffold modification
gcuucccaauuuuuccug

SEQ ID NO: 3724 - RNA, 18 nt, Artificial Sequence
  Antisense oligonucleotide
  misc_feature (1)..(1): BNA scaffold modification
  misc_feature (15)..(15): BNA scaffold modification
  misc_feature (18)..(18): BNA scaffold modification
gcuucccaauuuuuccug

SEQ ID NO: 3725 - RNA, 18 nt, Artificial Sequence
  Antisense oligonucleotide
  misc_feature (1)..(1): BNA scaffold modification
  misc_feature (16)..(16): BNA scaffold modification
  misc_feature (18)..(18): BNA scaffold modification
gcuucccaauuuuuccug

SEQ ID NO: 3726 - RNA, 18 nt, Artificial Sequence
  Antisense oligonucleotide
  misc_feature (1)..(1): BNA scaffold modification
  misc_feature (6)..(6): BNA scaffold modification
  misc_feature (18)..(18): BNA scaffold modification
gcuucccaauuuuuccug

SEQ ID NO: 3727 - RNA, 18 nt, Artificial Sequence
  Antisense oligonucleotide
  misc_feature (1)..(1): BNA scaffold modification
  misc_feature (5)..(5): BNA scaffold modification
  misc_feature (15)..(15): BNA scaffold modification
  misc_feature (18)..(18): BNA scaffold modification
gcuucccaauuuuuccug

SEQ ID NO: 3728 - RNA, 18 nt, Artificial Sequence
  Antisense oligonucleotide
  misc_feature (1)..(1): BNA scaffold modification
  misc_feature (7)..(7): BNA scaffold modification
  misc_feature (16)..(16): BNA scaffold modification
  misc_feature (18)..(18): BNA scaffold modification
gcuucccaauuuuuccug

SEQ ID NO: 3729 - RNA, 18 nt, Artificial Sequence
  Antisense oligonucleotide
  misc_feature (1)..(2): BNA scaffold modification
  misc_feature (17)..(18): BNA scaffold modification
gcuucccaauuuuucctg

SEQ ID NO: 3730 - RNA, 18 nt, Artificial Sequence
  Antisense oligonucleotide
  misc_feature (1)..(2): BNA scaffold modification
  misc_feature (7)..(7): BNA scaffold modification
  misc_feature (15)..(15): BNA scaffold modification
  misc_feature (17)..(18): BNA scaffold modification
gcuucccaauuuuucctg

SEQ ID NO: 3731 - RNA, 18 nt, Artificial Sequence
  Antisense oligonucleotide
  misc_feature (1)..(1): BNA scaffold modification
  misc_feature (18)..(18): BNA scaffold modification
cuucccaauuuuuccugt

SEQ ID NO: 3732 - RNA, 18 nt, Artificial Sequence
  Antisense oligonucleotide
  misc_feature (1)..(1): BNA scaffold modification
  misc_feature (4)..(4): BNA scaffold modification
  misc_feature (18)..(18): BNA scaffold modification
cuucccaauuuuuccugt

SEQ ID NO: 3733 - RNA, 18 nt, Artificial Sequence
  Antisense oligonucleotide
  misc_feature (1)..(1): BNA scaffold modification
  misc_feature (5)..(5): BNA scaffold modification
  misc_feature (18)..(18): BNA scaffold modification
cuucccaauuuuuccugt

SEQ ID NO: 3734 - RNA, 18 nt, Artificial Sequence
  Antisense oligonucleotide
  misc_feature (1)..(1): BNA scaffold modification
  misc_feature (6)..(6): BNA scaffold modification
  misc_feature (18)..(18): BNA scaffold modification
cuucccaauuuuuccugt

SEQ ID NO: 3735 - RNA, 18 nt, Artificial Sequence
  Antisense oligonucleotide
  misc_feature (1)..(1): BNA scaffold modification
  misc_feature (14)..(14): BNA scaffold modification
  misc_feature (18)..(18): BNA scaffold modification
cuucccaauuuuuccugt

SEQ ID NO: 3736 - RNA, 18 nt, Artificial Sequence
  Antisense oligonucleotide
  misc_feature (1)..(1): BNA scaffold modification
  misc_feature (15)..(15): BNA scaffold modification
  misc_feature (18)..(18): BNA scaffold modification
cuucccaauuuuuccugt

SEQ ID NO: 3737 - RNA, 18 nt, Artificial Sequence
  Antisense oligonucleotide
  misc_feature (1)..(1): BNA scaffold modification
  misc_feature (17)..(18): BNA scaffold modification
cuucccaauuuuuccugt

SEQ ID NO: 3738 - RNA, 18 nt, Artificial Sequence
  Antisense oligonucleotide
  misc_feature (1)..(1): BNA scaffold modification
  misc_feature (6)..(6): BNA scaffold modification
  misc_feature (15)..(15): BNA scaffold modification
  misc_feature (18)..(18): BNA scaffold modification
cuucccaauuuuuccugt

SEQ ID NO: 3739 - RNA, 18 nt, Artificial Sequence
  Antisense oligonucleotide
  misc_feature (1)..(1): BNA scaffold modification
  misc_feature (4)..(4): BNA scaffold modification
  misc_feature (14)..(14): BNA scaffold modification
  misc_feature (18)..(18): BNA scaffold modification
cuucccaauuuuuccugt

SEQ ID NO: 3740 - RNA, 18 nt, Artificial Sequence
  Antisense oligonucleotide
  misc_feature (1)..(2): BNA scaffold modification
  misc_feature (17)..(18): BNA scaffold modification
ctucccaauuuuuccugt

SEQ ID NO: 3741 - RNA, 18 nt, Artificial Sequence
  Antisense oligonucleotide
  misc_feature (1)..(2): BNA scaffold modification
  misc_feature (6)..(6): BNA scaffold modification
  misc_feature (14)..(14): BNA scaffold modification
  misc_feature (17)..(18): BNA scaffold modification
ctucccaauuuuuccugt

SEQ ID NO: 3742 - RNA, 18 nt, Artificial Sequence
  Antisense oligonucleotide
  misc_feature (1)..(1): BNA scaffold modification
  misc_feature (18)..(18): BNA scaffold modification
tucccaauuuuuccugua

SEQ ID NO: 3743 - RNA, 18 nt, Artificial Sequence
  Antisense oligonucleotide
  misc_feature (1)..(1): BNA scaffold modification
  misc_feature (3)..(3): BNA scaffold modification
  misc_feature (18)..(18): BNA scaffold modification
tucccaauuuuuccugua

SEQ ID NO: 3744 - RNA, 18 nt, Artificial Sequence
  Antisense oligonucleotide
  misc_feature (1)..(1): BNA scaffold modification
  misc_feature (4)..(4): BNA scaffold modification
  misc_feature (18)..(18): BNA scaffold modification
tucccaauuuuuccugua

SEQ ID NO: 3745 - RNA, 18 nt, Artificial Sequence
  Antisense oligonucleotide
  misc_feature (1)..(1): BNA scaffold modification
  misc_feature (5)..(5): BNA scaffold modification
  misc_feature (18)..(18): BNA scaffold modification
tucccaauuuuuccugua

SEQ ID NO: 3746 - RNA, 18 nt, Artificial Sequence
  Antisense oligonucleotide
  misc_feature (1)..(1): BNA scaffold modification
  misc_feature (13)..(13): BNA scaffold modification
  misc_feature (18)..(18): BNA scaffold modification
tucccaauuuuuccugua

SEQ ID NO: 3747 - RNA, 18 nt, Artificial Sequence
  Antisense oligonucleotide
  misc_feature (1)..(1): BNA scaffold modification
  misc_feature (14)..(14): BNA scaffold modification
  misc_feature (18)..(18): BNA scaffold modification
tucccaauuuuuccugua

SEQ ID NO: 3748 - RNA, 18 nt, Artificial Sequence
  Antisense oligonucleotide
  misc_feature (1)..(1): BNA scaffold modification
  misc_feature (16)..(16): BNA scaffold modification
  misc_feature (18)..(18): BNA scaffold modification
tucccaauuuuuccugua

SEQ ID NO: 3749 - RNA, 18 nt, Artificial Sequence
  Antisense oligonucleotide
  misc_feature (1)..(1): BNA scaffold modification
  misc_feature (3)..(3): BNA scaffold modification
  misc_feature (16)..(16): BNA scaffold modification
  misc_feature (18)..(18): BNA scaffold modification
tucccaauuuuuccugua

SEQ ID NO: 3750 - RNA, 18 nt, Artificial Sequence
  Antisense oligonucleotide
  misc_feature (1)..(1): BNA scaffold modification
  misc_feature (5)..(5): BNA scaffold modification
  misc_feature (14)..(14): BNA scaffold modification
  misc_feature (18)..(18): BNA scaffold modification
tucccaauuuuuccugua

SEQ ID NO: 3751 - RNA, 18 nt, Artificial Sequence
  Antisense oligonucleotide
  misc_feature (1)..(2): BNA scaffold modification
  misc_feature (17)..(18): BNA scaffold modification
ttcccaauuuuuccugta

SEQ ID NO: 3752 - RNA, 18 nt, Artificial Sequence
  Antisense oligonucleotide
  misc_feature (1)..(2): BNA scaffold modification
  misc_feature (5)..(5): BNA scaffold modification
  misc_feature (13)..(13): BNA scaffold modification
  misc_feature (17)..(18): BNA scaffold modification
ttcccaauuuuuccugta

SEQ ID NO: 3753 - RNA, 18 nt, Artificial Sequence
  Antisense oligonucleotide
  misc_feature (1)..(1): BNA scaffold modification
  misc_feature (18)..(18): BNA scaffold modification
tcccaauuuuuccuguag

SEQ ID NO: 3754 - RNA, 18 nt, Artificial Sequence
  Antisense oligonucleotide
  misc_feature (1)..(1): BNA scaffold modification
  misc_feature (15)..(15): BNA scaffold modification
  misc_feature (18)..(18): BNA scaffold modification
tcccaauuuuuccuguag

SEQ ID NO: 3755 - RNA, 18 nt, Artificial Sequence
  Antisense oligonucleotide
  misc_feature (1)..(1): BNA scaffold modification
  misc_feature (13)..(13): BNA scaffold modification
  misc_feature (18)..(18): BNA scaffold modification
tcccaauuuuuccuguag

SEQ ID NO: 3756 - RNA, 18 nt, Artificial Sequence
  Antisense oligonucleotide
  misc_feature (1)..(1): BNA scaffold modification
  misc_feature (12)..(12): BNA scaffold modification
  misc_feature (18)..(18): BNA scaffold modification
tcccaauuuuuccuguag

SEQ ID NO: 3757 - RNA, 18 nt, Artificial Sequence
  Antisense oligonucleotide
  misc_feature (1)..(1): BNA scaffold modification
  misc_feature (4)..(4): BNA scaffold modification
  misc_feature (18)..(18): BNA scaffold modification
tcccaauuuuuccuguag

SEQ ID NO: 3758 - RNA, 18 nt, Artificial Sequence
  Antisense oligonucleotide
  misc_feature (1)..(2): BNA scaffold modification
  misc_feature (18)..(18): BNA scaffold modification
tcccaauuuuuccuguag

SEQ ID NO: 3759 - RNA, 18 nt, Artificial Sequence
  Antisense oligonucleotide
  misc_feature (1)..(1): BNA scaffold modification
  misc_feature (4)..(4): BNA scaffold modification
  misc_feature (15)..(15): BNA scaffold modification
  misc_feature (18)..(18): BNA scaffold modification
tcccaauuuuuccuguag

SEQ ID NO: 3760 - RNA, 18 nt, Artificial Sequence
  Antisense oligonucleotide
  misc_feature (1)..(2): BNA scaffold modification
  misc_feature (12)..(12): BNA scaffold modification
  misc_feature (18)..(18): BNA scaffold modification
tcccaauuuuuccuguag

SEQ ID NO: 3761 - RNA, 18 nt, Artificial Sequence
  Antisense oligonucleotide
  misc_feature (1)..(1): BNA scaffold modification
  misc_feature (3)..(3): BNA scaffold modification
  misc_feature (15)..(15): BNA scaffold modification
  misc_feature (18)..(18): BNA scaffold modification
tcccaauuuuuccuguag

SEQ ID NO: 3762 - RNA, 18 nt, Artificial Sequence
  Antisense oligonucleotide
  misc_feature (1)..(2): BNA scaffold modification
  misc_feature (17)..(18): BNA scaffold modification
tcccaauuuuuccuguag

SEQ ID NO: 3763 - RNA, 18 nt, Artificial Sequence
  Antisense oligonucleotide
  misc_feature (1)..(2): BNA scaffold modification
  misc_feature (12)..(12): BNA scaffold modification
  misc_feature (17)..(18): BNA scaffold modification
tcccaauuuuuccuguag

SEQ ID NO: 3764 - RNA, 16 nt, Artificial Sequence
  Antisense oligonucleotide
  misc_feature (1)..(1): BNA scaffold modification
  misc_feature (16)..(16): BNA scaffold modification
caggcuucccaauuut

SEQ ID NO: 3765 - RNA, 16 nt, Artificial Sequence
  Antisense oligonucleotide
  misc_feature (1)..(1): BNA scaffold modification
  misc_feature (3)..(3): BNA scaffold modification
  misc_feature (16)..(16): BNA scaffold modification
caggcuucccaauuut

SEQ ID NO: 3766 - RNA, 16 nt, Artificial Sequence
  Antisense oligonucleotide
  misc_feature (1)..(1): BNA scaffold modification
  misc_feature (4)..(4): BNA scaffold modification
  misc_feature (16)..(16): BNA scaffold modification
caggcuucccaauuut

SEQ ID NO: 3767 - RNA, 16 nt, Artificial Sequence
  Antisense oligonucleotide
  misc_feature (1)..(1): BNA scaffold modification
  misc_feature (5)..(5): BNA scaffold modification
  misc_feature (16)..(16): BNA scaffold modification
caggcuucccaauuut

SEQ ID NO: 3768 - RNA, 16 nt, Artificial Sequence
  Antisense oligonucleotide
  misc_feature (1)..(1): BNA scaffold modification
  misc_feature (8)..(8): BNA scaffold modification
  misc_feature (16)..(16): BNA scaffold modification
caggcuucccaauuut

SEQ ID NO: 3769 - RNA, 16 nt, Artificial Sequence
  Antisense oligonucleotide
  misc_feature (1)..(1): BNA scaffold modification
  misc_feature (10)..(10): BNA scaffold modification
  misc_feature (16)..(16): BNA scaffold modification
caggcuucccaauuut

SEQ ID NO: 3770 - RNA, 16 nt, Artificial Sequence
  Antisense oligonucleotide
  misc_feature (1)..(1): BNA scaffold modification
  misc_feature (5)..(5): BNA scaffold modification
  misc_feature (10)..(10): BNA scaffold modification
  misc_feature (16)..(16): BNA scaffold modification
caggcuucccaauuut

SEQ ID NO: 3771 - RNA, 16 nt, Artificial Sequence
  Antisense oligonucleotide
  misc_feature (1)..(1): BNA scaffold modification
  misc_feature (4)..(4): BNA scaffold modification
  misc_feature (9)..(9): BNA scaffold modification
  misc_feature (16)..(16): BNA scaffold modification
caggcuucccaauuut

SEQ ID NO: 3772 - RNA, 16 nt, Artificial Sequence
  Antisense oligonucleotide
  misc_feature (1)..(1): BNA scaffold modification
  misc_feature (3)..(3): BNA scaffold modification
  misc_feature (8)..(8): BNA scaffold modification
  misc_feature (16)..(16): BNA scaffold modification
caggcuucccaauuut

SEQ ID NO: 3773 - RNA, 16 nt, Artificial Sequence
  Antisense oligonucleotide
  misc_feature (1)..(2): BNA scaffold modification
  misc_feature (15)..(16): BNA scaffold modification
caggcuucccaauutt

SEQ ID NO: 3774 - RNA, 16 nt, Artificial Sequence
  Antisense oligonucleotide
  misc_feature (1)..(2): BNA scaffold modification
  misc_feature (8)..(8): BNA scaffold modification
  misc_feature (15)..(16): BNA scaffold modification
caggcuucccaauutt

SEQ ID NO: 3775 - RNA, 16 nt, Artificial Sequence
  Antisense oligonucleotide
  misc_feature (1)..(1): BNA scaffold modification
  misc_feature (16)..(16): BNA scaffold modification
aggcuucccaauuuuc

SEQ ID NO: 3776 - RNA, 16 nt, Artificial Sequence
  Antisense oligonucleotide
  misc_feature (1)..(2): BNA scaffold modification
  misc_feature (16)..(16): BNA scaffold modification
aggcuucccaauuuuc

SEQ ID NO: 3777 - RNA, 16 nt, Artificial Sequence
  Antisense oligonucleotide
  misc_feature (1)..(1): BNA scaffold modification
  misc_feature (3)..(3): BNA scaffold modification
  misc_feature (16)..(16): BNA scaffold modification
aggcuucccaauuuuc

SEQ ID NO: 3778 - RNA, 16 nt, Artificial Sequence
  Antisense oligonucleotide
  misc_feature (1)..(1): BNA scaffold modification
  misc_feature (4)..(4): BNA scaffold modification
  misc_feature (16)..(16): BNA scaffold modification
aggcuucccaauuuuc

SEQ ID NO: 3779 - RNA, 16 nt, Artificial Sequence
  Antisense oligonucleotide
  misc_feature (1)..(1): BNA scaffold modification
  misc_feature (7)..(7): BNA scaffold modification
  misc_feature (16)..(16): BNA scaffold modification
aggcuucccaauuuuc

SEQ ID NO: 3780 - RNA, 16 nt, Artificial Sequence
  Antisense oligonucleotide
  misc_feature (1)..(1): BNA scaffold modification
  misc_feature (8)..(8): BNA scaffold modification
  misc_feature (16)..(16): BNA scaffold modification
aggcuucccaauuuuc

SEQ ID NO: 3781 - RNA, 16 nt, Artificial Sequence
  Antisense oligonucleotide
  misc_feature (1)..(1): BNA scaffold modification
  misc_feature (9)..(9): BNA scaffold modification
  misc_feature (16)..(16): BNA scaffold modification
aggcuucccaauuuuc

SEQ ID NO: 3782 - RNA, 16 nt, Artificial Sequence
  Antisense oligonucleotide
  misc_feature (1)..(1): BNA scaffold modification
  misc_feature (4)..(4): BNA scaffold modification
  misc_feature (9)..(9): BNA scaffold modification
  misc_feature (16)..(16): BNA scaffold modification
aggcuucccaauuuuc

SEQ ID NO: 3783 - RNA, 16 nt, Artificial Sequence
  Antisense oligonucleotide
  misc_feature (1)..(1): BNA scaffold modification
  misc_feature (3)..(3): BNA scaffold modification
  misc_feature (8)..(8): BNA scaffold modification
  misc_feature (16)..(16): BNA scaffold modification
aggcuucccaauuuuc

SEQ ID NO: 3784 - RNA, 16 nt, Artificial Sequence
  Antisense oligonucleotide
  misc_feature (1)..(2): BNA scaffold modification
  misc_feature (7)..(7): BNA scaffold modification
  misc_feature (16)..(16): BNA scaffold modification
aggcuucccaauuuuc

SEQ ID NO: 3785 - RNA, 16 nt, Artificial Sequence
  Antisense oligonucleotide
  misc_feature (1)..(2): BNA scaffold modification
  misc_feature (15)..(16): BNA scaffold modification
aggcuucccaauuutc

SEQ ID NO: 3786 - RNA, 16 nt, Artificial Sequence
  Antisense oligonucleotide
  misc_feature (1)..(2): BNA scaffold modification
  misc_feature (9)..(9): BNA scaffold modification
  misc_feature (15)..(16): BNA scaffold modification
aggcuucccaauuutc

SEQ ID NO: 3787 - RNA, 16 nt, Artificial Sequence
  Antisense oligonucleotide
  misc_feature (1)..(1): BNA scaffold modification
  misc_feature (16)..(16): BNA scaffold modification
ggcuucccaauuuucc

SEQ ID NO: 3788 - RNA, 16 nt, Artificial Sequence
  Antisense oligonucleotide
  misc_feature (1)..(2): BNA scaffold modification
  misc_feature (16)..(16): BNA scaffold modification
ggcuucccaauuuucc

SEQ ID NO: 3789 - RNA, 16 nt, Artificial Sequence
  Antisense oligonucleotide
  misc_feature (1)..(1): BNA scaffold modification
  misc_feature (3)..(3): BNA scaffold modification
  misc_feature (16)..(16): BNA scaffold modification
ggcuucccaauuuucc

SEQ ID NO: 3790 - RNA, 16 nt, Artificial Sequence
  Antisense oligonucleotide
  misc_feature (1)..(1): BNA scaffold modification
  misc_feature (6)..(6): BNA scaffold modification
  misc_feature (16)..(16): BNA scaffold modification
ggcuucccaauuuucc

SEQ ID NO: 3791 - RNA, 16 nt, Artificial Sequence
  Antisense oligonucleotide
  misc_feature (1)..(1): BNA scaffold modification
  misc_feature (8)..(8): BNA scaffold modification
  misc_feature (16)..(16): BNA scaffold modification
ggcuucccaauuuucc

SEQ ID NO: 3792 - RNA, 16 nt, Artificial Sequence
  Antisense oligonucleotide
  misc_feature (1)..(1): BNA scaffold modification
  misc_feature (15)..(16): BNA scaffold modification
ggcuucccaauuuucc

SEQ ID NO: 3793 - RNA, 16 nt, Artificial Sequence
  Antisense oligonucleotide
  misc_feature (1)..(1): BNA scaffold modification
  misc_feature (3)..(3): BNA scaffold modification
  misc_feature (8)..(8): BNA scaffold modification
  misc_feature (16)..(16): BNA scaffold modification
ggcuucccaauuuucc

SEQ ID NO: 3794 - RNA, 16 nt, Artificial Sequence
  Antisense oligonucleotide
  misc_feature (1)..(2): BNA scaffold modification
  misc_feature (7)..(7): BNA scaffold modification
  misc_feature (16)..(16): BNA scaffold modification
ggcuucccaauuuucc

SEQ ID NO: 3795 - RNA, 16 nt, Artificial Sequence
  Antisense oligonucleotide
  misc_feature (1)..(2): BNA scaffold modification
  misc_feature (15)..(16): BNA scaffold modification
ggcuucccaauuuucc

SEQ ID NO: 3796 - RNA, 16 nt, Artificial Sequence
  Antisense oligonucleotide
  misc_feature (1)..(2): BNA scaffold modification
  misc_feature (8)..(8): BNA scaffold modification
  misc_feature (15)..(16): BNA scaffold modification
ggcuucccaauuuucc

SEQ ID NO: 3797 - RNA, 16 nt, Artificial Sequence
  Antisense oligonucleotide
  misc_feature (1)..(2): BNA scaffold modification
  misc_feature (6)..(6): BNA scaffold modification
  misc_feature (15)..(16): BNA scaffold modification
ggcuucccaauuuucc

SEQ ID NO: 3798 - RNA, 16 nt, Artificial Sequence
  Antisense oligonucleotide
  misc_feature (1)..(1): BNA scaffold modification
  misc_feature (16)..(16): BNA scaffold modification
gcuucccaauuuucct

SEQ ID NO: 3799 - RNA, 16 nt, Artificial Sequence
  Antisense oligonucleotide
  misc_feature (1)..(2): BNA scaffold modification
  misc_feature (16)..(16): BNA scaffold modification
gcuucccaauuuucct

SEQ ID NO: 3800 - RNA, 16 nt, Artificial Sequence
  Antisense oligonucleotide
  misc_feature (1)..(1): BNA scaffold modification
  misc_feature (5)..(5): BNA scaffold modification
  misc_feature (16)..(16): BNA scaffold modification
gcuucccaauuuucct

SEQ ID NO: 3801 - RNA, 16 nt, Artificial Sequence
  Antisense oligonucleotide
  misc_feature (1)..(1): BNA scaffold modification
  misc_feature (6)..(6): BNA scaffold modification
  misc_feature (16)..(16): BNA scaffold modification
gcuucccaauuuucct

SEQ ID NO: 3802 - RNA, 16 nt, Artificial Sequence
  Antisense oligonucleotide
  misc_feature (1)..(1): BNA scaffold modification
  misc_feature (7)..(7): BNA scaffold modification
  misc_feature (16)..(16): BNA scaffold modification
gcuucccaauuuucct

SEQ ID NO: 3803 - RNA, 16 nt, Artificial Sequence
  Antisense oligonucleotide
  misc_feature (1)..(1): BNA scaffold modification
  misc_feature (14)..(14): BNA scaffold modification
  misc_feature (16)..(16): BNA scaffold modification
gcuucccaauuuucct

SEQ ID NO: 3804 - RNA, 16 nt, Artificial Sequence
  Antisense oligonucleotide
  misc_feature (1)..(1): BNA scaffold modification
  misc_feature (15)..(16): BNA scaffold modification
gcuucccaauuuucct

SEQ ID NO: 3805 - RNA, 16 nt, Artificial Sequence
  Antisense oligonucleotide
  misc_feature (1)..(1): BNA scaffold modification
  misc_feature (5)..(5): BNA scaffold modification
  misc_feature (14)..(14): BNA scaffold modification
  misc_feature (16)..(16): BNA scaffold modification
gcuucccaauuuucct

SEQ ID NO: 3806 - RNA, 16 nt, Artificial Sequence
  Antisense oligonucleotide
  misc_feature (1)..(2): BNA scaffold modification
  misc_feature (7)..(7): BNA scaffold modification
  misc_feature (16)..(16): BNA scaffold modification
gcuucccaauuuucct

SEQ ID NO: 3807 - RNA, 16 nt, Artificial Sequence
  Antisense oligonucleotide
  misc_feature (1)..(2): BNA scaffold modification
  misc_feature (15)..(16): BNA scaffold modification
gcuucccaauuuucct

SEQ ID NO: 3808 - RNA, 16 nt, Artificial Sequence
  Antisense oligonucleotide
  misc_feature (1)..(2): BNA scaffold modification
  misc_feature (7)..(7): BNA scaffold modification
  misc_feature (15)..(16): BNA scaffold modification
gcuucccaauuuucct

SEQ ID NO: 3809 - RNA, 16 nt, Artificial Sequence
  Antisense oligonucleotide
  misc_feature (1)..(1): BNA scaffold modification
  misc_feature (16)..(16): BNA scaffold modification
cuucccaauuuuccug

SEQ ID NO: 3810 - RNA, 16 nt, Artificial Sequence
  Antisense oligonucleotide
  misc_feature (1)..(1): BNA scaffold modification
  misc_feature (4)..(4): BNA scaffold modification
  misc_feature (16)..(16): BNA scaffold modification
cuucccaauuuuccug

SEQ ID NO: 3811 - RNA, 16 nt, Artificial Sequence
  Antisense oligonucleotide
  misc_feature (1)..(1): BNA scaffold modification
  misc_feature (5)..(5): BNA scaffold modification
  misc_feature (16)..(16): BNA scaffold modification
cuucccaauuuuccug

SEQ ID NO: 3812 - RNA, 16 nt, Artificial Sequence
  Antisense oligonucleotide
  misc_feature (1)..(1): BNA scaffold modification
  misc_feature (6)..(6): BNA scaffold modification
  misc_feature (16)..(16): BNA scaffold modification
cuucccaauuuuccug

SEQ ID NO: 3813 - RNA, 16 nt, Artificial Sequence
  Antisense oligonucleotide
  misc_feature (1)..(1): BNA scaffold modification
  misc_feature (13)..(13): BNA scaffold modification
  misc_feature (16)..(16): BNA scaffold modification
cuucccaauuuuccug

SEQ ID NO: 3814 - RNA, 16 nt, Artificial Sequence
  Antisense oligonucleotide
  misc_feature (1)..(1): BNA scaffold modification
  misc_feature (14)..(14): BNA scaffold modification
  misc_feature (16)..(16): BNA scaffold modification
cuucccaauuuuccug

SEQ ID NO: 3815 - RNA, 16 nt, Artificial Sequence
  Antisense oligonucleotide
  misc_feature (1)..(1): BNA scaffold modification
  misc_feature (6)..(6): BNA scaffold modification
  misc_feature (14)..(14): BNA scaffold modification
  misc_feature (16)..(16): BNA scaffold modification
cuucccaauuuuccug

SEQ ID NO: 3816 - RNA, 16 nt, Artificial Sequence
  Antisense oligonucleotide
  misc_feature (1)..(1): BNA scaffold modification
  misc_feature (4)..(4): BNA scaffold modification
  misc_feature (13)..(13): BNA scaffold modification
  misc_feature (16)..(16): BNA scaffold modification
cuucccaauuuuccug

SEQ ID NO: 3817 - RNA, 16 nt, Artificial Sequence
  Antisense oligonucleotide
  misc_feature (1)..(2): BNA scaffold modification
  misc_feature (15)..(16): BNA scaffold modification
ctucccaauuuucctg

SEQ ID NO: 3818 - RNA, 16 nt, Artificial Sequence
  Antisense oligonucleotide
  misc_feature (1)..(2): BNA scaffold modification
  misc_feature (6)..(6): BNA scaffold modification
  misc_feature (15)..(16): BNA scaffold modification
ctucccaauuuucctg

SEQ ID NO: 3819 - RNA, 16 nt, Artificial Sequence
  Antisense oligonucleotide
  misc_feature (1)..(2): BNA scaffold modification
  misc_feature (13)..(13): BNA scaffold modification
  misc_feature (15)..(16): BNA scaffold modification
ctucccaauuuucctg

SEQ ID NO: 3820 - RNA, 16 nt, Artificial Sequence
  Antisense oligonucleotide
  misc_feature (1)..(1): BNA scaffold modification
  misc_feature (16)..(16): BNA scaffold modification
tucccaauuuuccugt

SEQ ID NO: 3821 - RNA, 16 nt, Artificial Sequence
  Antisense oligonucleotide
  misc_feature (1)..(1): BNA scaffold modification
  misc_feature (3)..(3): BNA scaffold modification
  misc_feature (16)..(16): BNA scaffold modification
tucccaauuuuccugt

SEQ ID NO: 3822 - RNA, 16 nt, Artificial Sequence
  Antisense oligonucleotide
  misc_feature (1)..(1): BNA scaffold modification
  misc_feature (4)..(4): BNA scaffold modification
  misc_feature (16)..(16): BNA scaffold modification
tucccaauuuuccugt

SEQ ID NO: 3823 - RNA, 16 nt, Artificial Sequence
  Antisense oligonucleotide
  misc_feature (1)..(1): BNA scaffold modification
  misc_feature (5)..(5): BNA scaffold modification
  misc_feature (16)..(16): BNA scaffold modification
tucccaauuuuccugt

SEQ ID NO: 3824 - RNA, 16 nt, Artificial Sequence
  Antisense oligonucleotide
  misc_feature (1)..(1): BNA scaffold modification
  misc_feature (12)..(12): BNA scaffold modification
  misc_feature (16)..(16): BNA scaffold modification
tucccaauuuuccugt

SEQ ID NO: 3825 - RNA, 16 nt, Artificial Sequence
  Antisense oligonucleotide
  misc_feature (1)..(1): BNA scaffold modification
  misc_feature (13)..(13): BNA scaffold modification
  misc_feature (16)..(16): BNA scaffold modification
tucccaauuuuccugt

SEQ ID NO: 3826 - RNA, 16 nt, Artificial Sequence
  Antisense oligonucleotide
  misc_feature (1)..(1): BNA scaffold modification
  misc_feature (15)..(16): BNA scaffold modification
tucccaauuuuccugt

SEQ ID NO: 3827 - RNA, 16 nt, Artificial Sequence
  Antisense oligonucleotide
  misc_feature (1)..(1): BNA scaffold modification
  misc_feature (3)..(3): BNA scaffold modification
  misc_feature (12)..(12): BNA scaffold modification
  misc_feature (16)..(16): BNA scaffold modification
tucccaauuuuccugt

SEQ ID NO: 3828 - RNA, 16 nt, Artificial Sequence
  Antisense oligonucleotide
  misc_feature (1)..(1): BNA scaffold modification
  misc_feature (5)..(5): BNA scaffold modification
  misc_feature (13)..(13): BNA scaffold modification
  misc_feature (16)..(16): BNA scaffold modification
tucccaauuuuccugt

SEQ ID NO: 3829 - RNA, 16 nt, Artificial Sequence
  Antisense oligonucleotide
  misc_feature (1)..(2): BNA scaffold modification
  misc_feature (15)..(16): BNA scaffold modification
ttcccaauuuuccugt

SEQ ID NO: 3830 - RNA, 16 nt, Artificial Sequence
  Antisense oligonucleotide
  misc_feature (1)..(2): BNA scaffold modification
  misc_feature (5)..(5): BNA scaffold modification
  misc_feature (12)..(12): BNA scaffold modification
  misc_feature (15)..(16): BNA scaffold modification
ttcccaauuuuccugt

SEQ ID NO: 3831 - RNA, 16 nt, Artificial Sequence
  Antisense oligonucleotide
  misc_feature (1)..(1): BNA scaffold modification
  misc_feature (16)..(16): BNA scaffold modification
tcccaauuuuccugua

SEQ ID NO: 3832 - RNA, 16 nt, Artificial Sequence
  Antisense oligonucleotide
  misc_feature (1)..(2): BNA scaffold modification
  misc_feature (16)..(16): BNA scaffold modification
tcccaauuuuccugua

SEQ ID NO: 3833 - RNA, 16 nt, Artificial Sequence
  Antisense oligonucleotide
  misc_feature (1)..(1): BNA scaffold modification
  misc_feature (3)..(3): BNA scaffold modification
  misc_feature (16)..(16): BNA scaffold modification
tcccaauuuuccugua

SEQ ID NO: 3834 - RNA, 16 nt, Artificial Sequence
  Antisense oligonucleotide
  misc_feature (1)..(1): BNA scaffold modification
  misc_feature (4)..(4): BNA scaffold modification
  misc_feature (16)..(16): BNA scaffold modification
tcccaauuuuccugua

SEQ ID NO: 3835 - RNA, 16 nt, Artificial Sequence
  Antisense oligonucleotide
  misc_feature (1)..(1): BNA scaffold modification
  misc_feature (11)..(11): BNA scaffold modification
  misc_feature (16)..(16): BNA scaffold modification
tcccaauuuuccugua

SEQ ID NO: 3836 - RNA, 16 nt, Artificial Sequence
  Antisense oligonucleotide
  misc_feature (1)..(1): BNA scaffold modification
  misc_feature (12)..(12): BNA scaffold modification
  misc_feature (16)..(16): BNA scaffold modification
tcccaauuuuccugua

SEQ ID NO: 3837 - RNA, 16 nt, Artificial Sequence
  Antisense oligonucleotide
  misc_feature (1)..(1): BNA scaffold modification
  misc_feature (14)..(14): BNA scaffold modification
  misc_feature (16)..(16): BNA scaffold modification
tcccaauuuuccugua

SEQ ID NO: 3838 - RNA, 16 nt, Artificial Sequence
  Antisense oligonucleotide
  misc_feature (1)..(1): BNA scaffold modification
  misc_feature (4)..(4): BNA scaffold modification
  misc_feature (14)..(14): BNA scaffold modification
  misc_feature (16)..(16): BNA scaffold modification
tcccaauuuuccugua

SEQ ID NO: 3839 - RNA, 16 nt, Artificial Sequence
  Antisense oligonucleotide
  misc_feature (1)..(1): BNA scaffold modification
  misc_feature (4)..(4): BNA scaffold modification
  misc_feature (12)..(12): BNA scaffold modification
  misc_feature (16)..(16): BNA scaffold modification
tcccaauuuuccugua

SEQ ID NO: 3840 - RNA, 16 nt, Artificial Sequence
  Antisense oligonucleotide
  misc_feature (1)..(2): BNA scaffold modification
  misc_feature (11)..(11): BNA scaffold modification
  misc_feature (16)..(16): BNA scaffold modification
tcccaauuuuccugua

SEQ ID NO: 3841 - RNA, 16 nt, Artificial Sequence
  Antisense oligonucleotide
  misc_feature (1)..(1): BNA scaffold modification
  misc_feature (4)..(4): BNA scaffold modification
  misc_feature (11)..(11): BNA scaffold modification
  misc_feature (14)..(14): BNA scaffold modification
  misc_feature (16)..(16): BNA scaffold modification
tcccaauuuuccugua

SEQ ID NO: 3842 - RNA, 16 nt, Artificial Sequence
  Antisense oligonucleotide
  misc_feature (1)..(2): BNA scaffold modification
  misc_feature (15)..(16): BNA scaffold modification
tcccaauuuuccugta

SEQ ID NO: 3843 - RNA, 16 nt, Artificial Sequence
  Antisense oligonucleotide
  misc_feature (1)..(2): BNA scaffold modification
  misc_feature (11)..(11): BNA scaffold modification
  misc_feature (15)..(16): BNA scaffold modification
tcccaauuuuccugta

SEQ ID NO: 3844 - RNA, 16 nt, Artificial Sequence
  Antisense oligonucleotide
  misc_feature (1)..(1): BNA scaffold modification
  misc_feature (16)..(16): BNA scaffold modification
cccaauuuuccuguag

SEQ ID NO: 3845 - RNA, 16 nt, Artificial Sequence
  Antisense oligonucleotide
  misc_feature (1)..(2): BNA scaffold modification
  misc_feature (16)..(16): BNA scaffold modification
cccaauuuuccuguag

SEQ ID NO: 3846 - RNA, 16 nt, Artificial Sequence
  Antisense oligonucleotide
  misc_feature (1)..(1): BNA scaffold modification
  misc_feature (3)..(3): BNA scaffold modification
  misc_feature (16)..(16): BNA scaffold modification
cccaauuuuccuguag

SEQ ID NO: 3847 - RNA, 16 nt, Artificial Sequence
  Antisense oligonucleotide
  misc_feature (1)..(1): BNA scaffold modification
  misc_feature (10)..(10): BNA scaffold modification
  misc_feature (16)..(16): BNA scaffold modification
cccaauuuuccuguag

SEQ ID NO: 3848 - RNA, 16 nt, Artificial Sequence
  Antisense oligonucleotide
  misc_feature (1)..(1): BNA scaffold modification
  misc_feature (11)..(11): BNA scaffold modification
  misc_feature (16)..(16): BNA scaffold modification
cccaauuuuccuguag

SEQ ID NO: 3849 - RNA, 16 nt, Artificial Sequence
  Antisense oligonucleotide
  misc_feature (1)..(1): BNA scaffold modification
  misc_feature (13)..(13): BNA scaffold modification
  misc_feature (16)..(16): BNA scaffold modification
cccaauuuuccuguag

SEQ ID NO: 3850 - RNA, 16 nt, Artificial Sequence
  Antisense oligonucleotide
  misc_feature (1)..(1): BNA scaffold modification
  misc_feature (3)..(3): BNA scaffold modification
  misc_feature (13)..(13): BNA scaffold modification
  misc_feature (16)..(16): BNA scaffold modification
cccaauuuuccuguag

SEQ ID NO: 3851 - RNA, 16 nt, Artificial Sequence
  Antisense oligonucleotide
  misc_feature (1)..(1): BNA scaffold modification
  misc_feature (10)..(10): BNA scaffold modification
  misc_feature (13)..(13): BNA scaffold modification
  misc_feature (16)..(16): BNA scaffold modification
cccaauuuuccuguag

SEQ ID NO: 3852 - RNA, 16 nt, Artificial Sequence
  Antisense oligonucleotide
  misc_feature (1)..(1): BNA scaffold modification
  misc_feature (3)..(3): BNA scaffold modification
  misc_feature (11)..(11): BNA scaffold modification
  misc_feature (16)..(16): BNA scaffold modification
cccaauuuuccuguag

SEQ ID NO: 3853 - RNA, 16 nt, Artificial Sequence
  Antisense oligonucleotide
  misc_feature (1)..(2): BNA scaffold modification
  misc_feature (15)..(16): BNA scaffold modification
cccaauuuuccuguag

SEQ ID NO: 3854 - RNA, 16 nt, Artificial Sequence
  Antisense oligonucleotide
  misc_feature (1)..(2): BNA scaffold modification
  misc_feature (10)..(10): BNA scaffold modification
  misc_feature (15)..(16): BNA scaffold modification
cccaauuuuccuguag

SEQ ID NO: 3855 - RNA, 25 nt, Artificial Sequence
  Antisense oligonucleotide
  misc_feature (1)..(1): BNA scaffold modification
  misc_feature (7)..(7): n is inosine, often denoted as i
  misc_feature (25)..(25): BNA scaffold modification
tuugccncugcccaaugccauccug

SEQ ID NO: 3856 - RNA, 25 nt, Artificial Sequence
  Antisense oligonucleotide
  misc_feature (1)..(1): BNA scaffold modification
  misc_feature (4)..(4): BNA scaffold modification
  misc_feature (7)..(7): n is inosine, often denoted as i
  misc_feature (25)..(25): BNA scaffold modification
tuugccncugcccaaugccauccug

SEQ ID NO: 3857 - RNA, 25 nt, Artificial Sequence
  Antisense oligonucleotide
  misc_feature (1)..(1): BNA scaffold modification
  misc_feature (7)..(7): n is inosine, often denoted as i
  misc_feature (10)..(10): BNA scaffold modification
  misc_feature (25)..(25): BNA scaffold modification
tuugccncugcccaaugccauccug

SEQ ID NO: 3858 - RNA, 25 nt, Artificial Sequence
  Antisense oligonucleotide
  misc_feature (1)..(1): BNA scaffold modification
  misc_feature (7)..(7): n is inosine, often denoted as i
  misc_feature (17)..(17): BNA scaffold modification
  misc_feature (25)..(25): BNA scaffold modification
tuugccncugcccaaugccauccug

SEQ ID NO: 3859 - RNA, 25 nt, Artificial Sequence
  Antisense oligonucleotide
  misc_feature (1)..(1): BNA scaffold modification
  misc_feature (7)..(7): n is inosine, often denoted as i
  misc_feature (23)..(23): BNA scaffold modification
  misc_feature (25)..(25): BNA scaffold modification
tuugccncugcccaaugccauccug

SEQ ID NO: 3860 - RNA, 25 nt, Artificial Sequence
  Antisense oligonucleotide
  misc_feature (1)..(1): BNA scaffold modification
  misc_feature (7)..(7): n is inosine, often denoted as i
  misc_feature (19)..(19): BNA scaffold modification
  misc_feature (25)..(25): BNA scaffold modification
tuugccncugcccaaugccauccug

SEQ ID NO: 3861 - RNA, 25 nt, Artificial Sequence
  Antisense oligonucleotide
  misc_feature (1)..(1): BNA scaffold modification
  misc_feature (7)..(7): n is inosine, often denoted as i
  misc_feature (13)..(13): BNA scaffold modification
  misc_feature (25)..(25): BNA scaffold modification
tuugccncugcccaaugccauccug

SEQ ID NO: 3862 - RNA, 25 nt, Artificial Sequence
  Antisense oligonucleotide
  misc_feature (1)..(1): BNA scaffold modification
  misc_feature (6)..(6): BNA scaffold modification
  misc_feature (7)..(7): n is inosine, often denoted as i
  misc_feature (25)..(25): BNA scaffold modification
tuugccncugcccaaugccauccug

SEQ ID NO: 3863 - RNA, 25 nt, Artificial Sequence
  Antisense oligonucleotide
  misc_feature (1)..(1): BNA scaffold modification
  misc_feature (4)..(4): BNA scaffold modification
  misc_feature (7)..(7): n is inosine, often denoted as i
  misc_feature (10)..(10): BNA scaffold modification
  misc_feature (25)..(25): BNA scaffold modification
tuugccncugcccaaugccauccug

SEQ ID NO: 3864 - RNA, 25 nt, Artificial Sequence
  Antisense oligonucleotide
  misc_feature (1)..(1): BNA scaffold modification
  misc_feature (7)..(7): n is inosine, often denoted as i
  misc_feature (10)..(10): BNA scaffold modification
  misc_feature (17)..(17): BNA scaffold modification
  misc_feature (25)..(25): BNA scaffold modification
tuugccncugcccaaugccauccug

SEQ ID NO: 3865 - RNA, 25 nt, Artificial Sequence
  Antisense oligonucleotide
  misc_feature (1)..(1): BNA scaffold modification
  misc_feature (6)..(6): BNA scaffold modification
  misc_feature (7)..(7): n is inosine, often denoted as i
  misc_feature (23)..(23): BNA scaffold modification
  misc_feature (25)..(25): BNA scaffold modification
tuugccncugcccaaugccauccug

SEQ ID NO: 3866 - RNA, 25 nt, Artificial Sequence
  Antisense oligonucleotide
  misc_feature (1)..(1): BNA scaffold modification
  misc_feature (7)..(7): n is inosine, often denoted as i
  misc_feature (13)..(13): BNA scaffold modification
  misc_feature (19)..(19): BNA scaffold modification
  misc_feature (25)..(25): BNA scaffold modification
tuugccncugcccaaugccauccug

SEQ ID NO: 3867 - RNA, 25 nt, Artificial Sequence
  Antisense oligonucleotide
  misc_feature (1)..(1): BNA scaffold modification
  misc_feature (6)..(6): BNA scaffold modification
  misc_feature (7)..(7): n is inosine, often denoted as i
  misc_feature (13)..(13): BNA scaffold modification
  misc_feature (25)..(25): BNA scaffold modification
tuugccncugcccaaugccauccug

SEQ ID NO: 3868 - RNA, 25 nt, Artificial Sequence
  Antisense oligonucleotide
  misc_feature (1)..(1): BNA scaffold modification
  misc_feature (4)..(4): BNA scaffold modification
  misc_feature (7)..(7): n is inosine, often denoted as i
  misc_feature (10)..(10): BNA scaffold modification
  misc_feature (17)..(17): BNA scaffold modification
  misc_feature (25)..(25): BNA scaffold modification
tuugccncugcccaaugccauccug

SEQ ID NO: 3869 - RNA, 25 nt, Artificial Sequence
  Antisense oligonucleotide
  misc_feature (1)..(2): BNA scaffold modification
  misc_feature (7)..(7): n is inosine, often denoted as i
  misc_feature (17)..(17): BNA scaffold modification
  misc_feature (24)..(25): BNA scaffold modification
ttugccncugcccaaugccaucctg

SEQ ID NO: 3870 - RNA, 25 nt, Artificial Sequence
  Antisense oligonucleotide
  misc_feature (1)..(2): BNA scaffold modification
  misc_feature (7)..(7): n is inosine, often denoted as i
  misc_feature (10)..(10): BNA scaffold modification
  misc_feature (17)..(17): BNA scaffold modification
  misc_feature (24)..(25): BNA scaffold modification
ttugccncugcccaaugccaucctg

SEQ ID NO: 3871 - RNA, 22 nt, Artificial Sequence
  Antisense oligonucleotide
  misc_feature (1)..(1): BNA scaffold modification
  misc_feature (4)..(4): BNA scaffold modification
  misc_feature (7)..(7): n is inosine, often denoted as i
  misc_feature (22)..(22): BNA scaffold modification
tuugccncugcccaaugccauc

SEQ ID NO: 3872 - RNA, 22 nt, Artificial Sequence
  Antisense oligonucleotide
  misc_feature (1)..(1): BNA scaffold modification
  misc_feature (7)..(7): n is inosine, often denoted as i
  misc_feature (10)..(10): BNA scaffold modification
  misc_feature (22)..(22): BNA scaffold modification
tuugccncugcccaaugccauc

SEQ ID NO: 3873 - RNA, 22 nt, Artificial Sequence
  Antisense oligonucleotide
  misc_feature (1)..(1): BNA scaffold modification
  misc_feature (7)..(7): n is inosine, often denoted as i
  misc_feature (17)..(17): BNA scaffold modification
  misc_feature (22)..(22): BNA scaffold modification
tuugccncugcccaaugccauc

SEQ ID NO: 3874 - RNA, 22 nt, Artificial Sequence
  Antisense oligonucleotide
  misc_feature (1)..(1): BNA scaffold modification
  misc_feature (7)..(7): n is inosine, often denoted as i
  misc_feature (19)..(19): BNA scaffold modification
  misc_feature (22)..(22): BNA scaffold modification
tuugccncugcccaaugccauc

SEQ ID NO: 3875 - RNA, 22 nt, Artificial Sequence
  Antisense oligonucleotide
  misc_feature (1)..(1): BNA scaffold modification
  misc_feature (7)..(7): n is inosine, often denoted as i
  misc_feature (13)..(13): BNA scaffold modification
  misc_feature (22)..(22): BNA scaffold modification
tuugccncugcccaaugccauc

SEQ ID NO: 3876 - RNA, 22 nt, Artificial Sequence
  Antisense oligonucleotide
  misc_feature (1)..(1): BNA scaffold modification
  misc_feature (7)..(7): n is inosine, often denoted as i
  misc_feature (8)..(8): BNA scaffold modification
  misc_feature (22)..(22): BNA scaffold modification
tuugccncugcccaaugccauc

SEQ ID NO: 3877 - RNA, 22 nt, Artificial Sequence
  Antisense oligonucleotide
  misc_feature (1)..(1): BNA scaffold modification
  misc_feature (6)..(6): BNA scaffold modification
  misc_feature (7)..(7): n is inosine, often denoted as i
  misc_feature (22)..(22): BNA scaffold modification
tuugccncugcccaaugccauc

SEQ ID NO: 3878 - RNA, 22 nt, Artificial Sequence
  Antisense oligonucleotide
  misc_feature (1)..(1): BNA scaffold modification
  misc_feature (7)..(7): n is inosine, often denoted as i
  misc_feature (13)..(13): BNA scaffold modification
  misc_feature (19)..(19): BNA scaffold modification
  misc_feature (22)..(22): BNA scaffold modification
tuugccncugcccaaugccauc

SEQ ID NO: 3879 - RNA, 22 nt, Artificial Sequence
  Antisense oligonucleotide
  misc_feature (1)..(1): BNA scaffold modification
  misc_feature (7)..(7): n is inosine, often denoted as i
  misc_feature (8)..(8): BNA scaffold modification
  misc_feature (13)..(13): BNA scaffold modification
  misc_feature (22)..(22): BNA scaffold modification
tuugccncugcccaaugccauc

SEQ ID NO: 3880 - RNA, 22 nt, Artificial Sequence
  Antisense oligonucleotide
  misc_feature (1)..(1): BNA scaffold modification
  misc_feature (4)..(4): BNA scaffold modification
  misc_feature (7)..(7): n is inosine, often denoted as i
  misc_feature (10)..(10): BNA scaffold modification
  misc_feature (17)..(17): BNA scaffold modification
  misc_feature (22)..(22): BNA scaffold modification
tuugccncugcccaaugccauc

SEQ ID NO: 3881 - RNA, 22 nt, Artificial Sequence
  Antisense oligonucleotide
  misc_feature (1)..(2): BNA scaffold modification
  misc_feature (7)..(7): n is inosine, often denoted as i
  misc_feature (21)..(22): BNA scaffold modification
ttugccncugcccaaugccatc

SEQ ID NO: 3882 - RNA, 22 nt, Artificial Sequence
  Antisense oligonucleotide
  misc_feature (1)..(2): BNA scaffold modification
  misc_feature (7)..(7): n is inosine, often denoted as i
  misc_feature (10)..(10): BNA scaffold modification
  misc_feature (21)..(22): BNA scaffold modification
ttugccncugcccaaugccatc

SEQ ID NO: 3883 - RNA, 22 nt, Artificial Sequence
  Antisense oligonucleotide
  misc_feature (1)..(2): BNA scaffold modification
  misc_feature (7)..(7): n is inosine, often denoted as i
  misc_feature (17)..(17): BNA scaffold modification
  misc_feature (21)..(22): BNA scaffold modification
ttugccncugcccaaugccatc

SEQ ID NO: 3884 - RNA, 22 nt, Artificial Sequence
  Antisense oligonucleotide
  misc_feature (1)..(1): BNA scaffold modification
  misc_feature (6)..(6): n is inosine, often denoted as i
  misc_feature (22)..(22): BNA scaffold modification
tugccncugcccaaugccaucc

SEQ ID NO: 3885 - RNA, 22 nt, Artificial Sequence
  Antisense oligonucleotide
  misc_feature (1)..(1): BNA scaffold modification
  misc_feature (3)..(3): BNA scaffold modification
  misc_feature (6)..(6): n is inosine, often denoted as i
  misc_feature (22)..(22): BNA scaffold modification
tugccncugcccaaugccaucc

SEQ ID NO: 3886 - RNA, 22 nt, Artificial Sequence
  Antisense oligonucleotide
  misc_feature (1)..(1): BNA scaffold modification
  misc_feature (6)..(6): n is inosine, often denoted as i
  misc_feature (9)..(9): BNA scaffold modification
  misc_feature (22)..(22): BNA scaffold modification
tugccncugcccaaugccaucc

SEQ ID NO: 3887 - RNA, 22 nt, Artificial Sequence
  Antisense oligonucleotide
  misc_feature (1)..(1): BNA scaffold modification
  misc_feature (6)..(6): n is inosine, often denoted as i
  misc_feature (16)..(16): BNA scaffold modification
  misc_feature (22)..(22): BNA scaffold modification
tugccncugcccaaugccaucc

SEQ ID NO: 3888 - RNA, 22 nt, Artificial Sequence
  Antisense oligonucleotide
  misc_feature (1)..(1): BNA scaffold modification
  misc_feature (6)..(6): n is inosine, often denoted as i
  misc_feature (18)..(18): BNA scaffold modification
  misc_feature (22)..(22): BNA scaffold modification
tugccncugcccaaugccaucc

SEQ ID NO: 3889 - RNA, 22 nt, Artificial Sequence
  Antisense oligonucleotide
  misc_feature (1)..(1): BNA scaffold modification
  misc_feature (6)..(6): n is inosine, often denoted as i
  misc_feature (12)..(12): BNA scaffold modification
  misc_feature (22)..(22): BNA scaffold modification
tugccncugcccaaugccaucc

SEQ ID NO: 3890 - RNA, 22 nt, Artificial Sequence
  Antisense oligonucleotide
  misc_feature (1)..(1): BNA scaffold modification
  misc_feature (6)..(6): n is inosine, often denoted as i
  misc_feature (7)..(7): BNA scaffold modification
  misc_feature (22)..(22): BNA scaffold modification
tugccncugcccaaugccaucc

SEQ ID NO: 3891 - RNA, 22 nt, Artificial Sequence
  Antisense oligonucleotide
  misc_feature (1)..(1): BNA scaffold modification
  misc_feature (3)..(3): BNA scaffold modification
  misc_feature (6)..(6): n is inosine, often denoted as i
  misc_feature (9)..(9): BNA scaffold modification
  misc_feature (22)..(22): BNA scaffold modification
tugccncugcccaaugccaucc

SEQ ID NO: 3892 - RNA, 22 nt, Artificial Sequence
  Antisense oligonucleotide
  misc_feature (1)..(1): BNA scaffold modification
  misc_feature (6)..(6): n is inosine, often denoted as i
  misc_feature (9)..(9): BNA scaffold modification
  misc_feature (16)..(16): BNA scaffold modification
  misc_feature (22)..(22): BNA scaffold modification
tugccncugcccaaugccaucc

SEQ ID NO: 3893 - RNA, 22 nt, Artificial Sequence
  Antisense oligonucleotide
  misc_feature (1)..(1): BNA scaffold modification
  misc_feature (6)..(6): n is inosine, often denoted as i
  misc_feature (7)..(7): BNA scaffold modification
  misc_feature (12)..(12): BNA scaffold modification
  misc_feature (18)..(18): BNA scaffold modification
  misc_feature (22)..(22): BNA scaffold modification
tugccncugcccaaugccaucc

SEQ ID NO: 3894 - RNA, 22 nt, Artificial Sequence
  Antisense oligonucleotide
  misc_feature (1)..(2): BNA scaffold modification
  misc_feature (6)..(6): n is inosine, often denoted as i
  misc_feature (21)..(22): BNA scaffold modification
ttgccncugcccaaugccaucc

SEQ ID NO: 3895 - RNA, 22 nt, Artificial Sequence
  Antisense oligonucleotide
  misc_feature (1)..(2): BNA scaffold modification
  misc_feature (6)..(6): n is inosine, often denoted as i
  misc_feature (16)..(16): BNA scaffold modification
  misc_feature (21)..(22): BNA scaffold modification
ttgccncugcccaaugccaucc

SEQ ID NO: 3896 - RNA, 22 nt, Artificial Sequence
  Antisense oligonucleotide
  misc_feature (1)..(2): BNA scaffold modification
  misc_feature (6)..(6): n is inosine, often denoted as i
  misc_feature (9)..(9): BNA scaffold modification
  misc_feature (16)..(16): BNA scaffold modification
  misc_feature (21)..(22): BNA scaffold modification
ttgccncugcccaaugccaucc

SEQ ID NO: 3897 - RNA, 22 nt, Artificial Sequence
  Antisense oligonucleotide
  misc_feature (1)..(1): BNA scaffold modification
  misc_feature (5)..(5): n is inosine, often denoted as i
  misc_feature (22)..(22): BNA scaffold modification
tgccncugcccaaugccaucct

SEQ ID NO: 3898 - RNA, 22 nt, Artificial Sequence
  Antisense oligonucleotide
  misc_feature (1)..(2): BNA scaffold modification
  misc_feature (5)..(5): n is inosine, often denoted as i
  misc_feature (22)..(22): BNA scaffold modification
tgccncugcccaaugccaucct

SEQ ID NO: 3899 - RNA, 22 nt, Artificial Sequence
  Antisense oligonucleotide
  misc_feature (1)..(1): BNA scaffold modification
  misc_feature (5)..(5): n is inosine, often denoted as i
  misc_feature (8)..(8): BNA scaffold modification
  misc_feature (22)..(22): BNA scaffold modification
tgccncugcccaaugccaucct

SEQ ID NO: 3900 - RNA, 22 nt, Artificial Sequence
  Antisense oligonucleotide
  misc_feature (1)..(1): BNA scaffold modification
  misc_feature (5)..(5): n is inosine, often denoted as i
  misc_feature (15)..(15): BNA scaffold modification
  misc_feature (22)..(22): BNA scaffold modification
tgccncugcccaaugccaucct

SEQ ID NO: 3901 - RNA, 22 nt, Artificial Sequence
  Antisense oligonucleotide
  misc_feature (1)..(1): BNA scaffold modification
  misc_feature (5)..(5): n is inosine, often denoted as i
  misc_feature (17)..(17): BNA scaffold modification
  misc_feature (22)..(22): BNA scaffold modification
tgccncugcccaaugccaucct

SEQ ID NO: 3902 - RNA, 22 nt, Artificial Sequence
  Antisense oligonucleotide
  misc_feature (1)..(1): BNA scaffold modification
  misc_feature (5)..(5): n is inosine, often denoted as i
  misc_feature (11)..(11): BNA scaffold modification
  misc_feature (22)..(22): BNA scaffold modification
tgccncugcccaaugccaucct

SEQ ID NO: 3903 - RNA, 22 nt, Artificial Sequence
  Antisense oligonucleotide
  misc_feature (1)..(1): BNA scaffold modification
  misc_feature (5)..(5): n is inosine, often denoted as i
  misc_feature (6)..(6): BNA scaffold modification
  misc_feature (22)..(22): BNA scaffold modification
tgccncugcccaaugccaucct

SEQ ID NO: 3904 - RNA, 22 nt, Artificial Sequence
  Antisense oligonucleotide
  misc_feature (1)..(2): BNA scaffold modification
  misc_feature (5)..(5): n is inosine, often denoted as i
  misc_feature (8)..(8): BNA scaffold modification
  misc_feature (22)..(22): BNA scaffold modification
tgccncugcccaaugccaucct

SEQ ID NO: 3905 - RNA, 22 nt, Artificial Sequence
  Antisense oligonucleotide
  misc_feature (1)..(1): BNA scaffold modification
  misc_feature (5)..(5): n is inosine, often denoted as i
  misc_feature (8)..(8): BNA scaffold modification
  misc_feature (15)..(15): BNA scaffold modification
  misc_feature (22)..(22): BNA scaffold modification
tgccncugcccaaugccaucct

SEQ ID NO: 3906 - RNA, 22 nt, Artificial Sequence
  Antisense oligonucleotide
  misc_feature (1)..(1): BNA scaffold modification
  misc_feature (5)..(5): n is inosine, often denoted as i
  misc_feature (11)..(11): BNA scaffold modification
  misc_feature (17)..(17): BNA scaffold modification
  misc_feature (22)..(22): BNA scaffold modification
tgccncugcccaaugccaucct

SEQ ID NO: 3907 - RNA, 22 nt, Artificial Sequence
  Antisense oligonucleotide
  misc_feature (1)..(1): BNA scaffold modification
  misc_feature (5)..(5): n is inosine, often denoted as i
  misc_feature (6)..(6): BNA scaffold modification
  misc_feature (11)..(11): BNA scaffold modification
  misc_feature (22)..(22): BNA scaffold modification
tgccncugcccaaugccaucct

SEQ ID NO: 3908 - RNA, 22 nt, Artificial Sequence
  Antisense oligonucleotide
  misc_feature (1)..(2): BNA scaffold modification
  misc_feature (5)..(5): n is inosine, often denoted as i
  misc_feature (21)..(22): BNA scaffold modification
tgccncugcccaaugccaucct

SEQ ID NO: 3909 - RNA, 22 nt, Artificial Sequence
  Antisense oligonucleotide
  misc_feature (1)..(2): BNA scaffold modification
  misc_feature (5)..(5): n is inosine, often denoted as i
  misc_feature (11)..(11): BNA scaffold modification
  misc_feature (21)..(22): BNA scaffold modification
tgccncugcccaaugccaucct

SEQ ID NO: 3910 - RNA, 20 nt, Artificial Sequence
  Antisense oligonucleotide
  misc_feature (1)..(1): BNA scaffold modification
  misc_feature (7)..(7): n is inosine, often denoted as i
  misc_feature (20)..(20): BNA scaffold modification
tuugccncugcccaaugcca

SEQ ID NO: 3911 - RNA, 20 nt, Artificial Sequence
  Antisense oligonucleotide
  misc_feature (1)..(1): BNA scaffold modification
  misc_feature (4)..(4): BNA scaffold modification
  misc_feature (7)..(7): n is inosine, often denoted as i
  misc_feature (20)..(20): BNA scaffold modification
tuugccncugcccaaugcca

SEQ ID NO: 3912 - RNA, 20 nt, Artificial Sequence
  Antisense oligonucleotide
  misc_feature (1)..(1): BNA scaffold modification
  misc_feature (7)..(7): n is inosine, often denoted as i
  misc_feature (10)..(10): BNA scaffold modification
  misc_feature (20)..(20): BNA scaffold modification
tuugccncugcccaaugcca

SEQ ID NO: 3913 - RNA, 20 nt, Artificial Sequence
  Antisense oligonucleotide
  misc_feature (1)..(1): BNA scaffold modification
  misc_feature (7)..(7): n is inosine, often denoted as i
  misc_feature (17)..(17): BNA scaffold modification
  misc_feature (20)..(20): BNA scaffold modification
tuugccncugcccaaugcca

SEQ ID NO: 3914 - RNA, 20 nt, Artificial Sequence
  Antisense oligonucleotide
  misc_feature (1)..(1): BNA scaffold modification
  misc_feature (7)..(7): n is inosine, often denoted as i
  misc_feature (10)..(10): BNA scaffold modification
  misc_feature (17)..(17): BNA scaffold modification
  misc_feature (20)..(20): BNA scaffold modification
tuugccncugcccaaugcca

SEQ ID NO: 3915 - RNA, 20 nt, Artificial Sequence
  Antisense oligonucleotide
  misc_feature (1)..(1): BNA scaffold modification
  misc_feature (4)..(4): BNA scaffold modification
  misc_feature (7)..(7): n is inosine, often denoted as i
  misc_feature (10)..(10): BNA scaffold modification
  misc_feature (20)..(20): BNA scaffold modification
tuugccncugcccaaugcca

SEQ ID NO: 3916 - RNA, 20 nt, Artificial Sequence
  Antisense oligonucleotide
  misc_feature (1)..(1): BNA scaffold modification
  misc_feature (7)..(7): n is inosine, often denoted as i
  misc_feature (13)..(13): BNA scaffold modification
  misc_feature (20)..(20): BNA scaffold modification
tuugccncugcccaaugcca

SEQ ID NO: 3917 - RNA, 20 nt, Artificial Sequence
  Antisense oligonucleotide
  misc_feature (1)..(1): BNA scaffold modification
  misc_feature (7)..(7): n is inosine, often denoted as i
  misc_feature (8)..(8): BNA scaffold modification
  misc_feature (20)..(20): BNA scaffold modification
tuugccncugcccaaugcca

SEQ ID NO: 3918 - RNA, 20 nt, Artificial Sequence
  Antisense oligonucleotide
  misc_feature (1)..(1): BNA scaffold modification
  misc_feature (7)..(7): n is inosine, often denoted as i
  misc_feature (8)..(8): BNA scaffold modification
  misc_feature (13)..(13): BNA scaffold modification
  misc_feature (20)..(20): BNA scaffold modification
tuugccncugcccaaugcca

SEQ ID NO: 3919 - RNA, 20 nt, Artificial Sequence
  Antisense oligonucleotide
  misc_feature (1)..(2): BNA scaffold modification
  misc_feature (7)..(7): n is inosine, often denoted as i
  misc_feature (19)..(20): BNA scaffold modification
ttugccncugcccaaugcca

SEQ ID NO: 3920 - RNA, 20 nt, Artificial Sequence
  Antisense oligonucleotide
  misc_feature (1)..(2): BNA scaffold modification
  misc_feature (7)..(7): n is inosine, often denoted as i
  misc_feature (8)..(8): BNA scaffold modification
  misc_feature (13)..(13): BNA scaffold modification
  misc_feature (19)..(20): BNA scaffold modification
ttugccncugcccaaugcca

SEQ ID NO: 3921 - RNA, 20 nt, Artificial Sequence
  Antisense oligonucleotide
  misc_feature (1)..(1): BNA scaffold modification
  misc_feature (6)..(6): n is inosine, often denoted as i
  misc_feature (20)..(20): BNA scaffold modification
tugccncugcccaaugccat

SEQ ID NO: 3922 - RNA, 20 nt, Artificial Sequence
  Antisense oligonucleotide
  misc_feature (1)..(1): BNA scaffold modification
  misc_feature (6)..(6): n is inosine, often denoted as i
  misc_feature (3)..(3): BNA scaffold modification
  misc_feature (20)..(20): BNA scaffold modification
tugccncugcccaaugccat

SEQ ID NO: 3923 - RNA, 20 nt, Artificial Sequence
  Antisense oligonucleotide
  misc_feature (1)..(1): BNA scaffold modification
  misc_feature (6)..(6): n is inosine, often denoted as i
  misc_feature (9)..(9): BNA scaffold modification
  misc_feature (20)..(20): BNA scaffold modification
tugccncugcccaaugccat

SEQ ID NO: 3924 - RNA, 20 nt, Artificial Sequence
  Antisense oligonucleotide
  misc_feature (1)..(1): BNA scaffold modification
  misc_feature (6)..(6): n is inosine, often denoted as i
  misc_feature (16)..(16): BNA scaffold modification
  misc_feature (20)..(20): BNA scaffold modification
tugccncugcccaaugccat

SEQ ID NO: 3925 - RNA, 20 nt, Artificial Sequence
  Antisense oligonucleotide
  misc_feature (1)..(1): BNA scaffold modification
  misc_feature (6)..(6): n is inosine, often denoted as i
  misc_feature (9)..(9): BNA scaffold modification
  misc_feature (16)..(16): BNA scaffold modification
  misc_feature (20)..(20): BNA scaffold modification
tugccncugcccaaugccat

SEQ ID NO: 3926 - RNA, 20 nt, Artificial Sequence
  Antisense oligonucleotide
  misc_feature (1)..(1): BNA scaffold modification
  misc_feature (3)..(3): BNA scaffold modification
  misc_feature (6)..(6): n is inosine, often denoted as i
  misc_feature (9)..(9): BNA scaffold modification
  misc_feature (20)..(20): BNA scaffold modification
tugccncugcccaaugccat

SEQ ID NO: 3927 - RNA, 20 nt, Artificial Sequence
  Antisense oligonucleotide
  misc_feature (1)..(1): BNA scaffold modification
  misc_feature (6)..(6): n is inosine, often denoted as i
  misc_feature (18)..(18): BNA scaffold modification
  misc_feature (20)..(20): BNA scaffold modification
tugccncugcccaaugccat

SEQ ID NO: 3928 - RNA, 20 nt, Artificial Sequence
  Antisense oligonucleotide
  misc_feature (1)..(1): BNA scaffold modification
  misc_feature (6)..(6): n is inosine, often denoted as i
  misc_feature (12)..(12): BNA scaffold modification
  misc_feature (20)..(20): BNA scaffold modification
tugccncugcccaaugccat

SEQ ID NO: 3929 - RNA, 20 nt, Artificial Sequence
  Antisense oligonucleotide
  misc_feature (1)..(1): BNA scaffold modification
  misc_feature (6)..(6): n is inosine, often denoted as i
  misc_feature (7)..(7): BNA scaffold modification
  misc_feature (20)..(20): BNA scaffold modification
tugccncugcccaaugccat

SEQ ID NO: 3930 - RNA, 20 nt, Artificial Sequence
  Antisense oligonucleotide
  misc_feature (1)..(1): BNA scaffold modification
  misc_feature (6)..(6): n is inosine, often denoted as i
  misc_feature (12)..(12): BNA scaffold modification
  misc_feature (18)..(18): BNA scaffold modification
  misc_feature (20)..(20): BNA scaffold modification
tugccncugcccaaugccat

SEQ ID NO: 3931 - RNA, 20 nt, Artificial Sequence
  Antisense oligonucleotide
  misc_feature (1)..(1): BNA scaffold modification
  misc_feature (6)..(6): n is inosine, often denoted as i
  misc_feature (7)..(7): BNA scaffold modification
  misc_feature (12)..(12): BNA scaffold modification
  misc_feature (20)..(20): BNA scaffold modification
tugccncugcccaaugccat

SEQ ID NO: 3932 - RNA, 20 nt, Artificial Sequence
  Antisense oligonucleotide
  misc_feature (1)..(2): BNA scaffold modification
  misc_feature (6)..(6): n is inosine, often denoted as i
  misc_feature (19)..(20): BNA scaffold modification
ttgccncugcccaaugccat

SEQ ID NO: 3933 - RNA, 20 nt, Artificial Sequence
  Antisense oligonucleotide
  misc_feature (1)..(2): BNA scaffold modification
  misc_feature (6)..(6): n is inosine, often denoted as i
  misc_feature (12)..(12): BNA scaffold modification
  misc_feature (19)..(20): BNA scaffold modification
ttgccncugcccaaugccat

SEQ ID NO: 3934 - RNA, 20 nt, Artificial Sequence
  Antisense oligonucleotide
  misc_feature (1)..(2): BNA scaffold modification
  misc_feature (6)..(6): n is inosine, often denoted as i
  misc_feature (9)..(9): BNA scaffold modification
  misc_feature (19)..(20): BNA scaffold modification
ttgccncugcccaaugccat

SEQ ID NO: 3935 - RNA, 20 nt, Artificial Sequence
  Antisense oligonucleotide
  misc_feature (1)..(1): BNA scaffold modification
  misc_feature (5)..(5): n is inosine, often denoted as i
  misc_feature (20)..(20): BNA scaffold modification
tgccncugcccaaugccauc

SEQ ID NO: 3936 - RNA, 20 nt, Artificial Sequence
  Antisense oligonucleotide
  misc_feature (1)..(2): BNA scaffold modification
  misc_feature (5)..(5): n is inosine, often denoted as i
  misc_feature (20)..(20): BNA scaffold modification
tgccncugcccaaugccauc

SEQ ID NO: 3937 - RNA, 20 nt, Artificial Sequence
  Antisense oligonucleotide
  misc_feature (1)..(1): BNA scaffold modification
  misc_feature (5)..(5): n is inosine, often denoted as i
  misc_feature (8)..(8): BNA scaffold modification
  misc_feature (20)..(20): BNA scaffold modification
tgccncugcccaaugccauc

SEQ ID NO: 3938 - RNA, 20 nt, Artificial Sequence
  Antisense oligonucleotide
  misc_feature (1)..(1): BNA scaffold modification
  misc_feature (5)..(5): n is inosine, often denoted as i
  misc_feature (15)..(15): BNA scaffold modification
  misc_feature (20)..(20): BNA scaffold modification
tgccncugcccaaugccauc

SEQ ID NO: 3939 - RNA, 20 nt, Artificial Sequence
  Antisense oligonucleotide
  misc_feature (1)..(1): BNA scaffold modification
  misc_feature (5)..(5): n is inosine, often denoted as i
  misc_feature (8)..(8): BNA scaffold modification
  misc_feature (15)..(15): BNA scaffold modification
  misc_feature (20)..(20): BNA scaffold modification
tgccncugcccaaugccauc

SEQ ID NO: 3940 - RNA, 20 nt, Artificial Sequence
  Antisense oligonucleotide
  misc_feature (1)..(2): BNA scaffold modification
  misc_feature (5)..(5): n is inosine, often denoted as i
  misc_feature (8)..(8): BNA scaffold modification
  misc_feature (20)..(20): BNA scaffold modification
tgccncugcccaaugccauc

SEQ ID NO: 3941 - RNA, 20 nt, Artificial Sequence
  Antisense oligonucleotide
  misc_feature (1)..(1): BNA scaffold modification
  misc_feature (5)..(5): n is inosine, often denoted as i
  misc_feature (17)..(17): BNA scaffold modification
  misc_feature (20)..(20): BNA scaffold modification
tgccncugcccaaugccauc

SEQ ID NO: 3942 - RNA, 20 nt, Artificial Sequence
  Antisense oligonucleotide
  misc_feature (1)..(1): BNA scaffold modification
  misc_feature (5)..(5): n is inosine, often denoted as i
  misc_feature (11)..(11): BNA scaffold modification
  misc_feature (20)..(20): BNA scaffold modification
tgccncugcccaaugccauc

SEQ ID NO: 3943 - RNA, 20 nt, Artificial Sequence
  Antisense oligonucleotide
  misc_feature (1)..(1): BNA scaffold modification
  misc_feature (5)..(5): n is inosine, often denoted as i
  misc_feature (6)..(6): BNA scaffold modification
  misc_feature (20)..(20): BNA scaffold modification
tgccncugcccaaugccauc

SEQ ID NO: 3944 - RNA, 20 nt, Artificial Sequence
  Antisense oligonucleotide
  misc_feature (1)..(1): BNA scaffold modification
  misc_feature (5)..(5): n is inosine, often denoted as i
  misc_feature (11)..(11): BNA scaffold modification
  misc_feature (17)..(17): BNA scaffold modification
  misc_feature (20)..(20): BNA scaffold modification
tgccncugcccaaugccauc

SEQ ID NO: 3945 - RNA, 20 nt, Artificial Sequence
  Antisense oligonucleotide
  misc_feature (1)..(1): BNA scaffold modification
  misc_feature (5)..(5): n is inosine, often denoted as i
  misc_feature (6)..(6): BNA scaffold modification
  misc_feature (11)..(11): BNA scaffold modification
  misc_feature (20)..(20): BNA scaffold modification
tgccncugcccaaugccauc

SEQ ID NO: 3946 - RNA, 20 nt, Artificial Sequence
  Antisense oligonucleotide
  misc_feature (1)..(2): BNA scaffold modification
  misc_feature (5)..(5): n is inosine, often denoted as i
  misc_feature (19)..(20): BNA scaffold modification
tgccncugcccaaugccatc

SEQ ID NO: 3947 - RNA, 20 nt, Artificial Sequence
  Antisense oligonucleotide
  misc_feature (1)..(2): BNA scaffold modification
  misc_feature (5)..(5): n is inosine, often denoted as i
  misc_feature (8)..(8): BNA scaffold modification
  misc_feature (15)..(15): BNA scaffold modification
  misc_feature (19)..(20): BNA scaffold modification
tgccncugcccaaugccatc

SEQ ID NO: 3948 - RNA, 20 nt, Artificial Sequence
  Antisense oligonucleotide
  misc_feature (1)..(2): BNA scaffold modification
  misc_feature (5)..(5): n is inosine, often denoted as i
  misc_feature (6)..(6): BNA scaffold modification
  misc_feature (11)..(11): BNA scaffold modification
  misc_feature (19)..(20): BNA scaffold modification
tgccncugcccaaugccatc

SEQ ID NO: 3949 - RNA, 20 nt, Artificial Sequence
  Antisense oligonucleotide
  misc_feature (1)..(1): BNA scaffold modification
  misc_feature (4)..(4): n is inosine, often denoted as i
  misc_feature (20)..(20): BNA scaffold modification
gccncugcccaaugccaucc

SEQ ID NO: 3950 - RNA, 20 nt, Artificial Sequence
  Antisense oligonucleotide
  misc_feature (1)..(1): BNA scaffold modification
  misc_feature (4)..(4): n is inosine, often denoted as i
  misc_feature (7)..(7): BNA scaffold modification
  misc_feature (20)..(20): BNA scaffold modification
gccncugcccaaugccaucc

SEQ ID NO: 3951 - RNA, 20 nt, Artificial Sequence
  Antisense oligonucleotide
  misc_feature (1)..(1): BNA scaffold modification
  misc_feature (4)..(4): n is inosine, often denoted as i
  misc_feature (14)..(14): BNA scaffold modification
  misc_feature (20)..(20): BNA scaffold modification
gccncugcccaaugccaucc

SEQ ID NO: 3952 - RNA, 20 nt, Artificial Sequence
  Antisense oligonucleotide
  misc_feature (1)..(1): BNA scaffold modification
  misc_feature (4)..(4): n is inosine, often denoted as i
  misc_feature (7)..(7): BNA scaffold modification
  misc_feature (14)..(14): BNA scaffold modification
  misc_feature (20)..(20): BNA scaffold modification
gccncugcccaaugccaucc

SEQ ID NO: 3953 - RNA, 20 nt, Artificial Sequence
  Antisense oligonucleotide
  misc_feature (1)..(1): BNA scaffold modification
  misc_feature (4)..(4): n is inosine, often denoted as i
  misc_feature (10)..(10): BNA scaffold modification
  misc_feature (16)..(16): BNA scaffold modification
  misc_feature (20)..(20): BNA scaffold modification
gccncugcccaaugccaucc

SEQ ID NO: 3954 - RNA, 20 nt, Artificial Sequence
  Antisense oligonucleotide
  misc_feature (1)..(1): BNA scaffold modification
  misc_feature (4)..(4): n is inosine, often denoted as i
  misc_feature (16)..(16): BNA scaffold modification
  misc_feature (20)..(20): BNA scaffold modification
gccncugcccaaugccaucc

SEQ ID NO: 3955 - RNA, 20 nt, Artificial Sequence
  Antisense oligonucleotide
  misc_feature (1)..(1): BNA scaffold modification
  misc_feature (4)..(4): n is inosine, often denoted as i
  misc_feature (10)..(10): BNA scaffold modification
  misc_feature (20)..(20): BNA scaffold modification
gccncugcccaaugccaucc

SEQ ID NO: 3956 - RNA, 20 nt, Artificial Sequence
  Antisense oligonucleotide
  misc_feature (1)..(1): BNA scaffold modification
  misc_feature (4)..(4): n is inosine, often denoted as i
  misc_feature (5)..(5): BNA scaffold modification
  misc_feature (20)..(20): BNA scaffold modification
gccncugcccaaugccaucc

SEQ ID NO: 3957 - RNA, 20 nt, Artificial Sequence
  Antisense oligonucleotide
  misc_feature (1)..(1): BNA scaffold modification
  misc_feature (4)..(4): n is inosine, often denoted as i
  misc_feature (5)..(5): BNA scaffold modification
  misc_feature (10)..(10): BNA scaffold modification
  misc_feature (20)..(20): BNA scaffold modification
gccncugcccaaugccaucc

SEQ ID NO: 3958 - RNA, 20 nt, Artificial Sequence
  Antisense oligonucleotide
  misc_feature (1)..(1): BNA scaffold modification
  misc_feature (4)..(4): n is inosine, often denoted as i
  misc_feature (10)..(10): BNA scaffold modification
  misc_feature (16)..(16): BNA scaffold modification
  misc_feature (20)..(20): BNA scaffold modification
gccncugcccaaugccaucc

SEQ ID NO: 3959 - RNA, 20 nt, Artificial Sequence
  Antisense oligonucleotide
  misc_feature (1)..(1): BNA scaffold modification
  misc_feature (4)..(4): n is inosine, often denoted as i
  misc_feature (20)..(20): BNA scaffold modification
gccncugcccaaugccaucc

SEQ ID NO: 3960 - RNA, 20 nt, Artificial Sequence
  Antisense oligonucleotide
  misc_feature (1)..(2): BNA scaffold modification
  misc_feature (4)..(4): n is inosine, often denoted as i
  misc_feature (19)..(20): BNA scaffold modification
gccncugcccaaugccaucc

SEQ ID NO: 3961 - RNA, 20 nt, Artificial Sequence
  Antisense oligonucleotide
  misc_feature (1)..(2): BNA scaffold modification
  misc_feature (4)..(4): n is inosine, often denoted as i
  misc_feature (7)..(7): BNA scaffold modification
  misc_feature (14)..(14): BNA scaffold modification
  misc_feature (19)..(20): BNA scaffold modification
gccncugcccaaugccaucc

SEQ ID NO: 3962 - RNA, 20 nt, Artificial Sequence
  Antisense oligonucleotide
  misc_feature (1)..(2): BNA scaffold modification
  misc_feature (4)..(4): n is inosine, often denoted as i
  misc_feature (10)..(10): BNA scaffold modification
  misc_feature (16)..(16): BNA scaffold modification
  misc_feature (19)..(20): BNA scaffold modification
gccncugcccaaugccaucc

SEQ ID NO: 3963 - RNA, 20 nt, Artificial Sequence
  Antisense oligonucleotide
  misc_feature (1)..(1): BNA scaffold modification
  misc_feature (3)..(3): n is inosine, often denoted as i
  misc_feature (20)..(20): BNA scaffold modification
ccncugcccaaugccaucct

SEQ ID NO: 3964 - RNA, 20 nt, Artificial Sequence
  Antisense oligonucleotide
  misc_feature (1)..(1): BNA scaffold modification
  misc_feature (3)..(3): n is inosine, often denoted as i
  misc_feature (6)..(6): BNA scaffold modification
  misc_feature (20)..(20): BNA scaffold modification
ccncugcccaaugccaucct

SEQ ID NO: 3965 - RNA, 20 nt, Artificial Sequence
  Antisense oligonucleotide
  misc_feature (1)..(1): BNA scaffold modification
  misc_feature (3)..(3): n is inosine, often denoted as i
  misc_feature (13)..(13): BNA scaffold modification
  misc_feature (20)..(20): BNA scaffold modification
ccncugcccaaugccaucct

SEQ ID NO: 3966 - RNA, 20 nt, Artificial Sequence
  Antisense oligonucleotide
  misc_feature (1)..(1): BNA scaffold modification
  misc_feature (3)..(3): n is inosine, often denoted as i
  misc_feature (6)..(6): BNA scaffold modification
  misc_feature (13)..(13): BNA scaffold modification
  misc_feature (20)..(20): BNA scaffold modification
ccncugcccaaugccaucct

SEQ ID NO: 3967 - RNA, 20 nt, Artificial Sequence
  Antisense oligonucleotide
  misc_feature (1)..(1): BNA scaffold modification
  misc_feature (3)..(3): n is inosine, often denoted as i
  misc_feature (18)..(18): BNA scaffold modification
  misc_feature (20)..(20): BNA scaffold modification
ccncugcccaaugccaucct

SEQ ID NO: 3968 - RNA, 20 nt, Artificial Sequence
  Antisense oligonucleotide
  misc_feature (1)..(1): BNA scaffold modification
  misc_feature (3)..(3): n is inosine, often denoted as i
  misc_feature (15)..(15): BNA scaffold modification
  misc_feature (20)..(20): BNA scaffold modification
ccncugcccaaugccaucct

SEQ ID NO: 3969 - RNA, 20 nt, Artificial Sequence
  Antisense oligonucleotide
  misc_feature (1)..(1): BNA scaffold modification
  misc_feature (3)..(3): n is inosine, often denoted as i
  misc_feature (9)..(9): BNA scaffold modification
  misc_feature (20)..(20): BNA scaffold modification
ccncugcccaaugccaucct

SEQ ID NO: 3970 - RNA, 20 nt, Artificial Sequence
  Antisense oligonucleotide
  misc_feature (1)..(1): BNA scaffold modification
  misc_feature (3)..(3): n is inosine, often denoted as i
  misc_feature (4)..(4): BNA scaffold modification
  misc_feature (20)..(20): BNA scaffold modification
ccncugcccaaugccaucct

SEQ ID NO: 3971 - RNA, 20 nt, Artificial Sequence
  Antisense oligonucleotide
  misc_feature (1)..(1): BNA scaffold modification
  misc_feature (3)..(3): n is inosine, often denoted as i
  misc_feature (9)..(9): BNA scaffold modification
  misc_feature (15)..(15): BNA scaffold modification
  misc_feature (20)..(20): BNA scaffold modification
ccncugcccaaugccaucct

SEQ ID NO: 3972 - RNA, 20 nt, Artificial Sequence
  Antisense oligonucleotide
  misc_feature (1)..(1): BNA scaffold modification
  misc_feature (3)..(3): n is inosine, often denoted as i
  misc_feature (4)..(4): BNA scaffold modification
  misc_feature (9)..(9): BNA scaffold modification
  misc_feature (20)..(20): BNA scaffold modification
ccncugcccaaugccaucct

SEQ ID NO: 3973 - RNA, 20 nt, Artificial Sequence
  Antisense oligonucleotide
  misc_feature (1)..(2): BNA scaffold modification
  misc_feature (3)..(3): n is inosine, often denoted as i
  misc_feature (19)..(20): BNA scaffold modification
ccncugcccaaugccaucct

SEQ ID NO: 3974 - RNA, 20 nt, Artificial Sequence
  Antisense oligonucleotide
  misc_feature (1)..(2): BNA scaffold modification
  misc_feature (3)..(3): n is inosine, often denoted as i
  misc_feature (13)..(13): BNA scaffold modification
  misc_feature (19)..(20): BNA scaffold modification
ccncugcccaaugccaucct

SEQ ID NO: 3975 - RNA, 20 nt, Artificial Sequence
  Antisense oligonucleotide
  misc_feature (1)..(2): BNA scaffold modification
  misc_feature (3)..(3): n is inosine, often denoted as i
  misc_feature (6)..(6): BNA scaffold modification
  misc_feature (19)..(20): BNA scaffold modification
ccncugcccaaugccaucct

SEQ ID NO: 3976 - RNA, 20 nt, Artificial Sequence
  Antisense oligonucleotide
  misc_feature (1)..(1): BNA scaffold modification
  misc_feature (2)..(2): n is inosine, often denoted as i
  misc_feature (20)..(20): BNA scaffold modification
cncugcccaaugccauccug

SEQ ID NO: 3977 - RNA, 20 nt, Artificial Sequence
  Antisense oligonucleotide
  misc_feature (1)..(1): BNA scaffold modification
  misc_feature (2)..(2): n is inosine, often denoted as i
  misc_feature (5)..(5): BNA scaffold modification
  misc_feature (20)..(20): BNA scaffold modification
cncugcccaaugccauccug

SEQ ID NO: 3978 - RNA, 20 nt, Artificial Sequence
  Antisense oligonucleotide
  misc_feature (1)..(1): BNA scaffold modification
  misc_feature (2)..(2): n is inosine, often denoted as i
  misc_feature (12)..(12): BNA scaffold modification
  misc_feature (20)..(20): BNA scaffold modification
cncugcccaaugccauccug

SEQ ID NO: 3979 - RNA, 20 nt, Artificial Sequence
  Antisense oligonucleotide
  misc_feature (1)..(1): BNA scaffold modification
  misc_feature (2)..(2): n is inosine, often denoted as i
  misc_feature (5)..(5): BNA scaffold modification
  misc_feature (12)..(12): BNA scaffold modification
  misc_feature (20)..(20): BNA scaffold modification
cncugcccaaugccauccug

SEQ ID NO: 3980 - RNA, 20 nt, Artificial Sequence
  Antisense oligonucleotide
  misc_feature (1)..(1): BNA scaffold modification
  misc_feature (2)..(2): n is inosine, often denoted as i
  misc_feature (18)..(18): BNA scaffold modification
  misc_feature (20)..(20): BNA scaffold modification
cncugcccaaugccauccug

SEQ ID NO: 3981 - RNA, 20 nt, Artificial Sequence
  Antisense oligonucleotide
  misc_feature (1)..(1): BNA scaffold modification
  misc_feature (2)..(2): n is inosine, often denoted as i
  misc_feature (14)..(14): BNA scaffold modification
  misc_feature (20)..(20): BNA scaffold modification
cncugcccaaugccauccug

SEQ ID NO: 3982 - RNA, 20 nt, Artificial Sequence
  Antisense oligonucleotide
  misc_feature (1)..(1): BNA scaffold modification
  misc_feature (2)..(2): n is inosine, often denoted as i
  misc_feature (8)..(8): BNA scaffold modification
  misc_feature (20)..(20): BNA scaffold modification
cncugcccaaugccauccug

SEQ ID NO: 3983 - RNA, 20 nt, Artificial Sequence
  Antisense oligonucleotide
  misc_feature (1)..(1): BNA scaffold modification
  misc_feature (2)..(2): n is inosine, often denoted as i
  misc_feature (3)..(3): BNA scaffold modification
  misc_feature (20)..(20): BNA scaffold modification
cncugcccaaugccauccug

SEQ ID NO: 3984 - RNA, 20 nt, Artificial Sequence
  Antisense oligonucleotide
  misc_feature (1)..(1): BNA scaffold modification
  misc_feature (2)..(2): n is inosine, often denoted as i
  misc_feature (8)..(8): BNA scaffold modification
  misc_feature (14)..(14): BNA scaffold modification
  misc_feature (20)..(20): BNA scaffold modification
cncugcccaaugccauccug

SEQ ID NO: 3985 - RNA, 20 nt, Artificial Sequence
  Antisense oligonucleotide
  misc_feature (1)..(1): BNA scaffold modification
  misc_feature (2)..(2): n is inosine, often denoted as i
  misc_feature (3)..(3): BNA scaffold modification
  misc_feature (18)..(18): BNA scaffold modification
  misc_feature (20)..(20): BNA scaffold modification
cncugcccaaugccauccug

SEQ ID NO: 3986 - RNA, 20 nt, Artificial Sequence
  Antisense oligonucleotide
  misc_feature (1)..(1): BNA scaffold modification
  misc_feature (2)..(2): n is inosine, often denoted as i
  misc_feature (19)..(20): BNA scaffold modification
cncugcccaaugccaucctg

SEQ ID NO: 3987 - RNA, 20 nt, Artificial Sequence
  Antisense oligonucleotide
  misc_feature (1)..(1): BNA scaffold modification
  misc_feature (2)..(2): n is inosine, often denoted as i
  misc_feature (12)..(12): BNA scaffold modification
  misc_feature (19)..(20): BNA scaffold modification
cncugcccaaugccaucctg

SEQ ID NO: 3988 - RNA, 20 nt, Artificial Sequence
  Antisense oligonucleotide
  misc_feature (1)..(1): BNA scaffold modification
  misc_feature (2)..(2): n is inosine, often denoted as i
  misc_feature (5)..(5): BNA scaffold modification
  misc_feature (12)..(12): BNA scaffold modification
  misc_feature (19)..(20): BNA scaffold modification
cncugcccaaugccaucctg

SEQ ID NO: 3989 - RNA, 18 nt, Artificial Sequence
  Antisense oligonucleotide
  misc_feature (1)..(1): BNA scaffold modification
  misc_feature (7)..(7): n is inosine, often denoted as i
  misc_feature (18)..(18): BNA scaffold modification
tuugccncugcccaaugc

SEQ ID NO: 3990 - RNA, 18 nt, Artificial Sequence
  Antisense oligonucleotide
  misc_feature (1)..(1): BNA scaffold modification
  misc_feature (4)..(4): BNA scaffold modification
  misc_feature (7)..(7): n is inosine, often denoted as i
  misc_feature (18)..(18): BNA scaffold modification
tuugccncugcccaaugc

SEQ ID NO: 3991 - RNA, 18 nt, Artificial Sequence
  Antisense oligonucleotide
  misc_feature (1)..(1): BNA scaffold modification
  misc_feature (7)..(7): n is inosine, often denoted as i
  misc_feature (10)..(10): BNA scaffold modification
  misc_feature (18)..(18): BNA scaffold modification
tuugccncugcccaaugc

SEQ ID NO: 3992 - RNA, 18 nt, Artificial Sequence
  Antisense oligonucleotide
  misc_feature (1)..(1): BNA scaffold modification
  misc_feature (7)..(7): n is inosine, often denoted as i
  misc_feature (17)..(18): BNA scaffold modification
tuugccncugcccaaugc

SEQ ID NO: 3993 - RNA, 18 nt, Artificial Sequence
  Antisense oligonucleotide
  misc_feature (1)..(1): BNA scaffold modification
  misc_feature (4)..(4): BNA scaffold modification
  misc_feature (7)..(7): n is inosine, often denoted as i
  misc_feature (10)..(10): BNA scaffold modification
  misc_feature (18)..(18): BNA scaffold modification
tuugccncugcccaaugc

SEQ ID NO: 3994 - RNA, 18 nt, Artificial Sequence
  Antisense oligonucleotide
  misc_feature (1)..(1): BNA scaffold modification
  misc_feature (7)..(7): n is inosine, often denoted as i
  misc_feature (8)..(8): BNA scaffold modification
  misc_feature (13)..(13): BNA scaffold modification
  misc_feature (18)..(18): BNA scaffold modification
tuugccncugcccaaugc

SEQ ID NO: 3995 - RNA, 18 nt, Artificial Sequence
  Antisense oligonucleotide
  misc_feature (1)..(1): BNA scaffold modification
  misc_feature (6)..(6): BNA scaffold modification
  misc_feature (7)..(7): n is inosine, often denoted as i
  misc_feature (18)..(18): BNA scaffold modification
tuugccncugcccaaugc

SEQ ID NO: 3996 - RNA, 18 nt, Artificial Sequence
  Antisense oligonucleotide
  misc_feature (1)..(1): BNA scaffold modification
  misc_feature (7)..(7): n is inosine, often denoted as i
  misc_feature (8)..(8): BNA scaffold modification
  misc_feature (13)..(13): BNA scaffold modification
  misc_feature (18)..(18): BNA scaffold modification
tuugccncugcccaaugc

SEQ ID NO: 3997 - RNA, 18 nt, Artificial Sequence
  Antisense oligonucleotide
  misc_feature (1)..(2): BNA scaffold modification
  misc_feature (7)..(7): n is inosine, often denoted as i
  misc_feature (17)..(18): BNA scaffold modification
ttugccncugcccaaugc

SEQ ID NO: 3998 - RNA, 18 nt, Artificial Sequence
  Antisense oligonucleotide
  misc_feature (1)..(2): BNA scaffold modification
  misc_feature (7)..(7): n is inosine, often denoted as i
  misc_feature (10)..(10): BNA scaffold modification
  misc_feature (17)..(18): BNA scaffold modification
ttugccncugcccaaugc

SEQ ID NO: 3999 - RNA, 18 nt, Artificial Sequence
  Antisense oligonucleotide
  misc_feature (1)..(2): BNA scaffold modification
  misc_feature (7)..(7): n is inosine, often denoted as i
  misc_feature (8)..(8): BNA scaffold modification
  misc_feature (13)..(13): BNA scaffold modification
  misc_feature (17)..(18): BNA scaffold modification
ttugccncugcccaaugc

SEQ ID NO: 4000 - RNA, 18 nt, Artificial Sequence
  Antisense oligonucleotide
  misc_feature (1)..(1): BNA scaffold modification
  misc_feature (6)..(6): n is inosine, often denoted as i
  misc_feature (18)..(18): BNA scaffold modification
tugccncugcccaaugcc

SEQ ID NO: 4001 - RNA, 18 nt, Artificial Sequence
  Antisense oligonucleotide
  misc_feature (1)..(1): BNA scaffold modification
  misc_feature (3)..(3): BNA scaffold modification
  misc_feature (6)..(6): n is inosine, often denoted as i
  misc_feature (18)..(18): BNA scaffold modification
tugccncugcccaaugcc

SEQ ID NO: 4002 - RNA, 18 nt, Artificial Sequence
  Antisense oligonucleotide
  misc_feature (1)..(1): BNA scaffold modification
  misc_feature (6)..(6): n is inosine, often denoted as i
  misc_feature (9)..(9): BNA scaffold modification
  misc_feature (18)..(18): BNA scaffold modification
tugccncugcccaaugcc

SEQ ID NO: 4003 - RNA, 18 nt, Artificial Sequence
  Antisense oligonucleotide
  misc_feature (1)..(1): BNA scaffold modification
  misc_feature (6)..(6): n is inosine, often denoted as i
  misc_feature (16)..(16): BNA scaffold modification
  misc_feature (18)..(18): BNA scaffold modification
tugccncugcccaaugcc

SEQ ID NO: 4004 - RNA, 18 nt, Artificial Sequence
  Antisense oligonucleotide
  misc_feature (1)..(1): BNA scaffold modification
  misc_feature (6)..(6): n is inosine, often denoted as i
  misc_feature (9)..(9): BNA scaffold modification
  misc_feature (16)..(16): BNA scaffold modification
  misc_feature (18)..(18): BNA scaffold modification
tugccncugcccaaugcc

SEQ ID NO: 4005 - RNA, 18 nt, Artificial Sequence
  Antisense oligonucleotide
  misc_feature (1)..(1): BNA scaffold modification
  misc_feature (3)..(3): BNA scaffold modification
  misc_feature (6)..(6): n is inosine, often denoted as i
  misc_feature (9)..(9): BNA scaffold modification
  misc_feature (18)..(18): BNA scaffold modification
tugccncugcccaaugcc

SEQ ID NO: 4006 - RNA, 18 nt, Artificial Sequence
  Antisense oligonucleotide
  misc_feature (1)..(1): BNA scaffold modification
  misc_feature (6)..(6): n is inosine, often denoted as i
  misc_feature (12)..(12): BNA scaffold modification
  misc_feature (18)..(18): BNA scaffold modification
tugccncugcccaaugcc

SEQ ID NO: 4007 - RNA, 18 nt, Artificial Sequence
  Antisense oligonucleotide
  misc_feature (1)..(1): BNA scaffold modification
  misc_feature (6)..(6): n is inosine, often denoted as i
  misc_feature (7)..(7): BNA scaffold modification
  misc_feature (18)..(18): BNA scaffold modification
tugccncugcccaaugcc

SEQ ID NO: 4008 - RNA, 18 nt, Artificial Sequence
  Antisense oligonucleotide
  misc_feature (1)..(1): BNA scaffold modification
  misc_feature (6)..(6): n is inosine, often denoted as i
  misc_feature (7)..(7): BNA scaffold modification
  misc_feature (12)..(12): BNA scaffold modification
  misc_feature (18)..(18): BNA scaffold modification
tugccncugcccaaugcc

SEQ ID NO: 4009 - RNA, 18 nt, Artificial Sequence
  Antisense oligonucleotide
  misc_feature (1)..(1): BNA scaffold modification
  misc_feature (3)..(3): BNA scaffold modification
  misc_feature (6)..(6): n is inosine, often denoted as i
  misc_feature (16)..(16): BNA scaffold modification
  misc_feature (18)..(18): BNA scaffold modification
tugccncugcccaaugcc

SEQ ID NO: 4010 - RNA, 18 nt, Artificial Sequence
  Antisense oligonucleotide
  misc_feature (1)..(1): BNA scaffold modification
  misc_feature (3)..(3): BNA scaffold modification
  misc_feature (6)..(6): n is inosine, often denoted as i
  misc_feature (9)..(9): BNA scaffold modification
  misc_feature (16)..(16): BNA scaffold modification
  misc_feature (18)..(18): BNA scaffold modification
tugccncugcccaaugcc

SEQ ID NO: 4011 - RNA, 18 nt, Artificial Sequence
  Antisense oligonucleotide
  misc_feature (1)..(2): BNA scaffold modification
  misc_feature (6)..(6): n is inosine, often denoted as i
  misc_feature (17)..(18): BNA scaffold modification
ttgccncugcccaaugcc

SEQ ID NO: 4012 - RNA, 18 nt, Artificial Sequence
  Antisense oligonucleotide
  misc_feature (1)..(2): BNA scaffold modification
  misc_feature (6)..(6): n is inosine, often denoted as i
  misc_feature (9)..(9): BNA scaffold modification
  misc_feature (17)..(18): BNA scaffold modification
ttgccncugcccaaugcc

SEQ ID NO: 4013 - RNA, 18 nt, Artificial Sequence
  Antisense oligonucleotide
  misc_feature (1)..(2): BNA scaffold modification
  misc_feature (6)..(6): n is inosine, often denoted as i
  misc_feature (7)..(7): BNA scaffold modification
  misc_feature (9)..(9): BNA scaffold modification
  misc_feature (12)..(12): BNA scaffold modification
  misc_feature (17)..(18): BNA scaffold modification
ttgccncugcccaaugcc

SEQ ID NO: 4014 - RNA, 18 nt, Artificial Sequence
  Antisense oligonucleotide
  misc_feature (1)..(1): BNA scaffold modification
  misc_feature (5)..(5): n is inosine, often denoted as i
  misc_feature (18)..(18): BNA scaffold modification
tgccncugcccaaugcca

SEQ ID NO: 4015 - RNA, 18 nt, Artificial Sequence
  Antisense oligonucleotide
  misc_feature (1)..(2): BNA scaffold modification
  misc_feature (5)..(5): n is inosine, often denoted as i
  misc_feature (18)..(18): BNA scaffold modification
tgccncugcccaaugcca

SEQ ID NO: 4016 - RNA, 18 nt, Artificial Sequence
  Antisense oligonucleotide
  misc_feature (1)..(1): BNA scaffold modification
  misc_feature (5)..(5): n is inosine, often denoted as i
  misc_feature (8)..(8): BNA scaffold modification
  misc_feature (18)..(18): BNA scaffold modification
tgccncugcccaaugcca

SEQ ID NO: 4017 - RNA, 18 nt, Artificial Sequence
  Antisense oligonucleotide
  misc_feature (1)..(1): BNA scaffold modification
  misc_feature (5)..(5): n is inosine, often denoted as i
  misc_feature (15)..(15): BNA scaffold modification
  misc_feature (18)..(18): BNA scaffold modification
tgccncugcccaaugcca

SEQ ID NO: 4018 - RNA, 18 nt, Artificial Sequence
  Antisense oligonucleotide
  misc_feature (1)..(1): BNA scaffold modification
  misc_feature (5)..(5): n is inosine, often denoted as i
  misc_feature (8)..(8): BNA scaffold modification
  misc_feature (15)..(15): BNA scaffold modification
  misc_feature (18)..(18): BNA scaffold modification
tgccncugcccaaugcca

SEQ ID NO: 4019 - RNA, 18 nt, Artificial Sequence
  Antisense oligonucleotide
  misc_feature (1)..(2): BNA scaffold modification
  misc_feature (5)..(5): n is inosine, often denoted as i
  misc_feature (8)..(8): BNA scaffold modification
  misc_feature (18)..(18): BNA scaffold modification
tgccncugcccaaugcca

SEQ ID NO: 4020 - RNA, 18 nt, Artificial Sequence
  Antisense oligonucleotide
  misc_feature (1)..(2): BNA scaffold modification
  misc_feature (5)..(5): n is inosine, often denoted as i
  misc_feature (15)..(15): BNA scaffold modification
  misc_feature (18)..(18): BNA scaffold modification
tgccncugcccaaugcca

SEQ ID NO: 4021 - RNA, 18 nt, Artificial Sequence
  Antisense oligonucleotide
  misc_feature (1)..(1): BNA scaffold modification
  misc_feature (5)..(5): n is inosine, often denoted as i
  misc_feature (11)..(11): BNA scaffold modification
  misc_feature (18)..(18): BNA scaffold modification
tgccncugcccaaugcca

SEQ ID NO: 4022 - RNA, 18 nt, Artificial Sequence
  Antisense oligonucleotide
  misc_feature (1)..(1): BNA scaffold modification
  misc_feature (5)..(5): n is inosine, often denoted as i
  misc_feature (6)..(6): BNA scaffold modification
  misc_feature (11)..(11): BNA scaffold modification
  misc_feature (18)..(18): BNA scaffold modification
tgccncugcccaaugcca

SEQ ID NO: 4023 - RNA, 18 nt, Artificial Sequence
  Antisense oligonucleotide
  misc_feature (1)..(1): BNA scaffold modification
  misc_feature (5)..(5): n is inosine, often denoted as i
  misc_feature (6)..(6): BNA scaffold modification
  misc_feature (18)..(18): BNA scaffold modification
tgccncugcccaaugcca

SEQ ID NO: 4024 - RNA, 18 nt, Artificial Sequence
  Antisense oligonucleotide
  misc_feature (1)..(1): BNA scaffold modification
  misc_feature (4)..(4): BNA scaffold modification
  misc_feature (5)..(5): n is inosine, often denoted as i
  misc_feature (17)..(18): BNA scaffold modification
tgccncugcccaaugcca

SEQ ID NO: 4025 - RNA, 18 nt, Artificial Sequence
  Antisense oligonucleotide
  misc_feature (1)..(2): BNA scaffold modification
  misc_feature (5)..(5): n is inosine, often denoted as i
  misc_feature (17)..(18): BNA scaffold modification
tgccncugcccaaugcca

SEQ ID NO: 4026 - RNA, 18 nt, Artificial Sequence
  Antisense oligonucleotide
  misc_feature (1)..(2): BNA scaffold modification
  misc_feature (5)..(5): n is inosine, often denoted as i
  misc_feature (6)..(6): BNA scaffold modification
  misc_feature (11)..(11): BNA scaffold modification
  misc_feature (17)..(18): BNA scaffold modification
tgccncugcccaaugcca

SEQ ID NO: 4027 - RNA, 18 nt, Artificial Sequence
  Antisense oligonucleotide
  misc_feature (1)..(2): BNA scaffold modification
  misc_feature (5)..(5): n is inosine, often denoted as i
  misc_feature (8)..(8): BNA scaffold modification
  misc_feature (15)..(15): BNA scaffold modification
  misc_feature (17)..(18): BNA scaffold modification
tgccncugcccaaugcca

SEQ ID NO: 4028 - RNA, 18 nt, Artificial Sequence
  Antisense oligonucleotide
  misc_feature (1)..(1): BNA scaffold modification
  misc_feature (4)..(4): n is inosine, often denoted as i
  misc_feature (18)..(18): BNA scaffold modification
gccncugcccaaugccat

SEQ ID NO: 4029 - RNA, 18 nt, Artificial Sequence
  Antisense oligonucleotide
  misc_feature (1)..(1): BNA scaffold modification
  misc_feature (4)..(4): n is inosine, often denoted as i
  misc_feature (7)..(7): BNA scaffold modification
  misc_feature (18)..(18): BNA scaffold modification
gccncugcccaaugccat

SEQ ID NO: 4030 - RNA, 18 nt, Artificial Sequence
  Antisense oligonucleotide
  misc_feature (1)..(1): BNA scaffold modification
  misc_feature (4)..(4): n is inosine, often denoted as i
  misc_feature (14)..(14): BNA scaffold modification
  misc_feature (18)..(18): BNA scaffold modification
gccncugcccaaugccat

SEQ ID NO: 4031 - RNA, 18 nt, Artificial Sequence
  Antisense oligonucleotide
  misc_feature (1)..(1): BNA scaffold modification
  misc_feature (4)..(4): n is inosine, often denoted as i
  misc_feature (7)..(7): BNA scaffold modification
  misc_feature (14)..(14): BNA scaffold modification
  misc_feature (18)..(18): BNA scaffold modification
gccncugcccaaugccat

SEQ ID NO: 4032 - RNA, 18 nt, Artificial Sequence
  Antisense oligonucleotide
  misc_feature (1)..(1): BNA scaffold modification
  misc_feature (4)..(4): n is inosine, often denoted as i
  misc_feature (16)..(16): BNA scaffold modification
  misc_feature (18)..(18): BNA scaffold modification
gccncugcccaaugccat

SEQ ID NO: 4033 - RNA, 18 nt, Artificial Sequence
  Antisense oligonucleotide
  misc_feature (1)..(1): BNA scaffold modification
  misc_feature (4)..(4): n is inosine, often denoted as i
  misc_feature (10)..(10): BNA scaffold modification
  misc_feature (18)..(18): BNA scaffold modification
gccncugcccaaugccat

SEQ ID NO: 4034 - RNA, 18 nt, Artificial Sequence
  Antisense oligonucleotide
  misc_feature (1)..(1): BNA scaffold modification
  misc_feature (4)..(4): n is inosine, often denoted as i
  misc_feature (5)..(5): BNA scaffold modification
  misc_feature (18)..(18): BNA scaffold modification
gccncugcccaaugccat

SEQ ID NO: 4035 - RNA, 18 nt, Artificial Sequence
  Antisense oligonucleotide
  misc_feature (1)..(1): BNA scaffold modification
  misc_feature (4)..(4): n is inosine, often denoted as i
  misc_feature (5)..(5): BNA scaffold modification
  misc_feature (10)..(10): BNA scaffold modification
  misc_feature (18)..(18): BNA scaffold modification
gccncugcccaaugccat

SEQ ID NO: 4036 - RNA, 18 nt, Artificial Sequence
  Antisense oligonucleotide
  misc_feature (1)..(1): BNA scaffold modification
  misc_feature (4)..(4): n is inosine, often denoted as i
  misc_feature (10)..(10): BNA scaffold modification
  misc_feature (16)..(16): BNA scaffold modification
  misc_feature (18)..(18): BNA scaffold modification
gccncugcccaaugccat

SEQ ID NO: 4037 - RNA, 18 nt, Artificial Sequence
  Antisense oligonucleotide
  misc_feature (1)..(2): BNA scaffold modification
  misc_feature (4)..(4): n is inosine, often denoted as i
  misc_feature (17)..(18): BNA scaffold modification
gccncugcccaaugccat

SEQ ID NO: 4038 - RNA, 18 nt, Artificial Sequence
  Antisense oligonucleotide
  misc_feature (1)..(2): BNA scaffold modification
  misc_feature (4)..(4): n is inosine, often denoted as i
  misc_feature (7)..(7): BNA scaffold modification
  misc_feature (17)..(18): BNA scaffold modification
gccncugcccaaugccat

SEQ ID NO: 4039 - RNA, 18 nt, Artificial Sequence
  Antisense oligonucleotide
  misc_feature (1)..(2): BNA scaffold modification
  misc_feature (4)..(4): n is inosine, often denoted as i
  misc_feature (7)..(7): BNA scaffold modification
  misc_feature (14)..(14): BNA scaffold modification
  misc_feature (17)..(18): BNA scaffold modification
gccncugcccaaugccat

SEQ ID NO: 4040 - RNA, 18 nt, Artificial Sequence
  Antisense oligonucleotide
  misc_feature (1)..(2): BNA scaffold modification
  misc_feature (4)..(4): n is inosine, often denoted as i
  misc_feature (10)..(10): BNA scaffold modification
  misc_feature (17)..(18): BNA scaffold modification
gccncugcccaaugccat

SEQ ID NO: 4041 - RNA, 18 nt, Artificial Sequence
  Antisense oligonucleotide
  misc_feature (1)..(1): BNA scaffold modification
  misc_feature (3)..(3): n is inosine, often denoted as i
  misc_feature (18)..(18): BNA scaffold modification
ccncugcccaaugccauc

SEQ ID NO: 4042 - RNA, 18 nt, Artificial Sequence
  Antisense oligonucleotide
  misc_feature (1)..(1): BNA scaffold modification
  misc_feature (3)..(3): n is inosine, often denoted as i
  misc_feature (6)..(6): BNA scaffold modification
  misc_feature (18)..(18): BNA scaffold modification
ccncugcccaaugccauc

SEQ ID NO: 4043 - RNA, 18 nt, Artificial Sequence
  Antisense oligonucleotide
  misc_feature (1)..(1): BNA scaffold modification
  misc_feature (3)..(3): n is inosine, often denoted as i
  misc_feature (13)..(13): BNA scaffold modification
  misc_feature (18)..(18): BNA scaffold modification
ccncugcccaaugccauc

SEQ ID NO: 4044 - RNA, 18 nt, Artificial Sequence
  Antisense oligonucleotide
  misc_feature (1)..(1): BNA scaffold modification
  misc_feature (3)..(3): n is inosine, often denoted as i
  misc_feature (6)..(6): BNA scaffold modification
  misc_feature (13)..(13): BNA scaffold modification
  misc_feature (18)..(18): BNA scaffold modification
ccncugcccaaugccauc

SEQ ID NO: 4045 - RNA, 18 nt, Artificial Sequence
  Antisense oligonucleotide
  misc_feature (1)..(1): BNA scaffold modification
  misc_feature (3)..(3): n is inosine, often denoted as i
  misc_feature (15)..(15): BNA scaffold modification
  misc_feature (18)..(18): BNA scaffold modification
ccncugcccaaugccauc

SEQ ID NO: 4046 - RNA, 18 nt, Artificial Sequence
  Antisense oligonucleotide
  misc_feature (1)..(1): BNA scaffold modification
  misc_feature (3)..(3): n is inosine, often denoted as i
  misc_feature (9)..(9): BNA scaffold modification
  misc_feature (18)..(18): BNA scaffold modification
ccncugcccaaugccauc

SEQ ID NO: 4047 - RNA, 18 nt, Artificial Sequence
  Antisense oligonucleotide
  misc_feature (1)..(1): BNA scaffold modification
  misc_feature (3)..(3): n is inosine, often denoted as i
  misc_feature (4)..(4): BNA scaffold modification
  misc_feature (18)..(18): BNA scaffold modification
ccncugcccaaugccauc

SEQ ID NO: 4048 - RNA, 18 nt, Artificial Sequence
  Antisense oligonucleotide
  misc_feature (1)..(1): BNA scaffold modification
  misc_feature (3)..(3): n is inosine, often denoted as i
  misc_feature (9)..(9): BNA scaffold modification
  misc_feature (15)..(15): BNA scaffold modification
  misc_feature (18)..(18): BNA scaffold modification
ccncugcccaaugccauc

SEQ ID NO: 4049 - RNA, 18 nt, Artificial Sequence
  Antisense oligonucleotide
  misc_feature (1)..(1): BNA scaffold modification
  misc_feature (3)..(3): n is inosine, often denoted as i
  misc_feature (4)..(4): BNA scaffold modification
  misc_feature (9)..(9): BNA scaffold modification
  misc_feature (18)..(18): BNA scaffold modification
ccncugcccaaugccauc

SEQ ID NO: 4050 - RNA, 18 nt, Artificial Sequence
  Antisense oligonucleotide
  misc_feature (1)..(2): BNA scaffold modification
  misc_feature (3)..(3): n is inosine, often denoted as i
  misc_feature (17)..(18): BNA scaffold modification
ccncugcccaaugccatc

SEQ ID NO: 4051 - RNA, 18 nt, Artificial Sequence
  Antisense oligonucleotide
  misc_feature (1)..(2): BNA scaffold modification
  misc_feature (3)..(3): n is inosine, often denoted as i
  misc_feature (13)..(13): BNA scaffold modification
  misc_feature (17)..(18): BNA scaffold modification
ccncugcccaaugccatc

SEQ ID NO: 4052 - RNA, 18 nt, Artificial Sequence
  Antisense oligonucleotide
  misc_feature (1)..(2): BNA scaffold modification
  misc_feature (3)..(3): n is inosine, often denoted as i
  misc_feature (6)..(6): BNA scaffold modification
  misc_feature (13)..(13): BNA scaffold modification
  misc_feature (17)..(18): BNA scaffold modification
ccncugcccaaugccatc

SEQ ID NO: 4053 - RNA, 18 nt, Artificial Sequence
  Antisense oligonucleotide
  misc_feature (1)..(2): BNA scaffold modification
  misc_feature (3)..(3): n is inosine, often denoted as i
  misc_feature (9)..(9): BNA scaffold modification
  misc_feature (17)..(18): BNA scaffold modification
ccncugcccaaugccatc

SEQ ID NO: 4054 - RNA, 18 nt, Artificial Sequence
  Antisense oligonucleotide
  misc_feature (1)..(1): BNA scaffold modification
  misc_feature (2)..(2): n is inosine, often denoted as i
  misc_feature (18)..(18): BNA scaffold modification
cncugcccaaugccaucc

SEQ ID NO: 4055 - RNA, 18 nt, Artificial Sequence
  Antisense oligonucleotide
  misc_feature (1)..(1): BNA scaffold modification
  misc_feature (2)..(2): n is inosine, often denoted as i
  misc_feature (12)..(12): BNA scaffold modification
  misc_feature (18)..(18): BNA scaffold modification
cncugcccaaugccaucc

SEQ ID NO: 4056 - RNA, 18 nt, Artificial Sequence
  Antisense oligonucleotide
  misc_feature (1)..(1): BNA scaffold modification
  misc_feature (2)..(2): n is inosine, often denoted as i
  misc_feature (5)..(5): BNA scaffold modification
  misc_feature (18)..(18): BNA scaffold modification
cncugcccaaugccaucc

SEQ ID NO: 4057 - RNA, 18 nt, Artificial Sequence
  Antisense oligonucleotide
  misc_feature (1)..(1): BNA scaffold modification
  misc_feature (2)..(2): n is inosine, often denoted as i
  misc_feature (5)..(5): BNA scaffold modification
  misc_feature (12)..(12): BNA scaffold modification
  misc_feature (18)..(18): BNA scaffold modification
cncugcccaaugccaucc

SEQ ID NO: 4058 - RNA, 18 nt, Artificial Sequence
  Antisense oligonucleotide
  misc_feature (1)..(1): BNA scaffold modification
  misc_feature (2)..(2): n is inosine, often denoted as i
  misc_feature (14)..(14): BNA scaffold modification
  misc_feature (18)..(18): BNA scaffold modification
cncugcccaaugccaucc

SEQ ID NO: 4059 - RNA, 18 nt, Artificial Sequence
  Antisense oligonucleotide
  misc_feature (1)..(1): BNA scaffold modification
  misc_feature (2)..(2): n is inosine, often denoted as i
  misc_feature (8)..(8): BNA scaffold modification
  misc_feature (18)..(18): BNA scaffold modification
cncugcccaaugccaucc

SEQ ID NO: 4060 - RNA, 18 nt, Artificial Sequence
  Antisense oligonucleotide
  misc_feature (1)..(1): BNA scaffold modification
  misc_feature (2)..(2): n is inosine, often denoted as i
  misc_feature (8)..(8): BNA scaffold modification
  misc_feature (14)..(14): BNA scaffold modification
  misc_feature (18)..(18): BNA scaffold modification
cncugcccaaugccaucc

SEQ ID NO: 4061 - RNA, 18 nt, Artificial Sequence
  Antisense oligonucleotide
  misc_feature (1)..(1): BNA scaffold modification
  misc_feature (2)..(2): n is inosine, often denoted as i
  misc_feature (3)..(3): BNA scaffold modification
  misc_feature (14)..(14): BNA scaffold modification
  misc_feature (18)..(18): BNA scaffold modification
cncugcccaaugccaucc

SEQ ID NO: 4062 - RNA, 18 nt, Artificial Sequence
  Antisense oligonucleotide
  misc_feature (1)..(1): BNA scaffold modification
  misc_feature (2)..(2): n is inosine, often denoted as i
  misc_feature (12)..(12): BNA scaffold modification
  misc_feature (17)..(18): BNA scaffold modification
cncugcccaaugccaucc

SEQ ID NO: 4063 - RNA, 18 nt, Artificial Sequence
  Antisense oligonucleotide
  misc_feature (1)..(1): BNA scaffold modification
  misc_feature (2)..(2): n is inosine, often denoted as i
  misc_feature (5)..(5): BNA scaffold modification
  misc_feature (12)..(12): BNA scaffold modification
  misc_feature (17)..(18): BNA scaffold modification
cncugcccaaugccaucc

SEQ ID NO: 4064 - RNA, 18 nt, Artificial Sequence
  Antisense oligonucleotide
  misc_feature (1)..(1): BNA scaffold modification
  misc_feature (2)..(2): n is inosine, often denoted as i
  misc_feature (8)..(8): BNA scaffold modification
  misc_feature (14)..(14): BNA scaffold modification
  misc_feature (17)..(18): BNA scaffold modification
cncugcccaaugccaucc

SEQ ID NO: 4065 - RNA, 18 nt, Artificial Sequence
  Antisense oligonucleotide
  misc_feature (1)..(1): n is inosine, often denoted as i
  misc_feature (2)..(2): BNA scaffold modification
  misc_feature (18)..(18): BNA scaffold modification
ncugcccaaugccaucct

SEQ ID NO: 4066 - RNA, 18 nt, Artificial Sequence
  Antisense oligonucleotide
  misc_feature (1)..(1): n is inosine, often denoted as i
  misc_feature (2)..(2): BNA scaffold modification
  misc_feature (4)..(4): BNA scaffold modification
  misc_feature (18)..(18): BNA scaffold modification
ncugcccaaugccaucct

SEQ ID NO: 4067 - RNA, 18 nt, Artificial Sequence
  Antisense oligonucleotide
  misc_feature (1)..(1): n is inosine, often denoted as i
  misc_feature (2)..(2): BNA scaffold modification
  misc_feature (11)..(11): BNA scaffold modification
  misc_feature (18)..(18): BNA scaffold modification
ncugcccaaugccaucct

SEQ ID NO: 4068 - RNA, 18 nt, Artificial Sequence
  Antisense oligonucleotide
  misc_feature (1)..(1): n is inosine, often denoted as i
  misc_feature (2)..(2): BNA scaffold modification
  misc_feature (4)..(4): BNA scaffold modification
  misc_feature (11)..(11): BNA scaffold modification
  misc_feature (18)..(18): BNA scaffold modification
ncugcccaaugccaucct

SEQ ID NO: 4069 - RNA, 18 nt, Artificial Sequence
  Antisense oligonucleotide
  misc_feature (1)..(1): n is inosine, often denoted as i
  misc_feature (2)..(2): BNA scaffold modification
  misc_feature (7)..(7): BNA scaffold modification
  misc_feature (18)..(18): BNA scaffold modification
ncugcccaaugccaucct

SEQ ID NO: 4070 - RNA, 18 nt, Artificial Sequence
  Antisense oligonucleotide
  misc_feature (1)..(1): n is inosine, often denoted as i
  misc_feature (2)..(2): BNA scaffold modification
  misc_feature (13)..(13): BNA scaffold modification
  misc_feature (18)..(18): BNA scaffold modification
ncugcccaaugccaucct

SEQ ID NO: 4071 - RNA, 18 nt, Artificial Sequence
  Antisense oligonucleotide
  misc_feature (1)..(1): n is inosine, often denoted as i
  misc_feature (2)..(2): BNA scaffold modification
  misc_feature (7)..(7): BNA scaffold modification
  misc_feature (13)..(13): BNA scaffold modification
  misc_feature (18)..(18): BNA scaffold modification
ncugcccaaugccaucct

SEQ ID NO: 4072 - RNA, 18 nt, Artificial Sequence
  Antisense oligonucleotide
  misc_feature (1)..(1): n is inosine, often denoted as i
  misc_feature (2)..(2): BNA scaffold modification
  misc_feature (7)..(7): BNA scaffold modification
  misc_feature (16)..(16): BNA scaffold modification
  misc_feature (18)..(18): BNA scaffold modification
ncugcccaaugccaucct

SEQ ID NO: 4073 - RNA, 18 nt, Artificial Sequence
  Antisense oligonucleotide
  misc_feature (1)..(1): n is inosine, often denoted as i
  misc_feature (2)..(3): BNA scaffold modification
  misc_feature (17)..(18): BNA scaffold modification
nctgcccaaugccaucct

SEQ ID NO: 4074 - RNA, 18 nt, Artificial Sequence
  Antisense oligonucleotide
  misc_feature (1)..(1): n is inosine, often denoted as i
  misc_feature (2)..(2): BNA scaffold modification
  misc_feature (4)..(4): BNA scaffold modification
  misc_feature (11)..(11): BNA scaffold modification
  misc_feature (17)..(18): BNA scaffold modification
ncugcccaaugccaucct

SEQ ID NO: 4075 - RNA, 18 nt, Artificial Sequence
  Antisense oligonucleotide
  misc_feature (1)..(1): n is inosine, often denoted as i
  misc_feature (2)..(3): BNA scaffold modification
  misc_feature (7)..(7): BNA scaffold modification
  misc_feature (13)..(13): BNA scaffold modification
  misc_feature (17)..(18): BNA scaffold modification
nctgcccaaugccaucct

SEQ ID NO: 4076 - RNA, 18 nt, Artificial Sequence
  Antisense oligonucleotide
  misc_feature (1)..(1): BNA scaffold modification
  misc_feature (18)..(18): BNA scaffold modification
cugcccaaugccauccug

SEQ ID NO: 4077 - RNA, 18 nt, Artificial Sequence
  Antisense oligonucleotide
  misc_feature (1)..(1): BNA scaffold modification
  misc_feature (3)..(3): BNA scaffold modification
  misc_feature (18)..(18): BNA scaffold modification
cugcccaaugccauccug

SEQ ID NO: 4078 - RNA, 18 nt, Artificial Sequence
  Antisense oligonucleotide
  misc_feature (1)..(1): BNA scaffold modification
  misc_feature (10)..(10): BNA scaffold modification
  misc_feature (18)..(18): BNA scaffold modification
cugcccaaugccauccug

SEQ ID NO: 4079 - RNA, 18 nt, Artificial Sequence
  Antisense oligonucleotide
  misc_feature (1)..(1): BNA scaffold modification
  misc_feature (3)..(3): BNA scaffold modification
  misc_feature (10)..(10): BNA scaffold modification
  misc_feature (18)..(18): BNA scaffold modification
cugcccaaugccauccug

SEQ ID NO: 4080 - RNA, 18 nt, Artificial Sequence
  Antisense oligonucleotide
  misc_feature (1)..(1): BNA scaffold modification
  misc_feature (16)..(16): BNA scaffold modification
  misc_feature (18)..(18): BNA scaffold modification
cugcccaaugccauccug

SEQ ID NO: 4081 - RNA, 18 nt, Artificial Sequence
  Antisense oligonucleotide
  misc_feature (1)..(1): BNA scaffold modification
  misc_feature (12)..(12): BNA scaffold modification
  misc_feature (18)..(18): BNA scaffold modification
cugcccaaugccauccug

SEQ ID NO: 4082 - RNA, 18 nt, Artificial Sequence
  Antisense oligonucleotide
  misc_feature (1)..(1): BNA scaffold modification
  misc_feature (6)..(6): BNA scaffold modification
  misc_feature (18)..(18): BNA scaffold modification
cugcccaaugccauccug

SEQ ID NO: 4083 - RNA, 18 nt, Artificial Sequence
  Antisense oligonucleotide
  misc_feature (1)..(1): BNA scaffold modification
  misc_feature (12)..(12): BNA scaffold modification
  misc_feature (16)..(16): BNA scaffold modification
  misc_feature (18)..(18): BNA scaffold modification
cugcccaaugccauccug

SEQ ID NO: 4084 - RNA, 18 nt, Artificial Sequence
  Antisense oligonucleotide
  misc_feature (1)..(1): BNA scaffold modification
  misc_feature (6)..(6): BNA scaffold modification
  misc_feature (12)..(12): BNA scaffold modification
  misc_feature (18)..(18): BNA scaffold modification
cugcccaaugccauccug

SEQ ID NO: 4085 - RNA, 18 nt, Artificial Sequence
  Antisense oligonucleotide
  misc_feature (1)..(2): BNA scaffold modification
  misc_feature (17)..(18): BNA scaffold modification
ctgcccaaugccaucctg

SEQ ID NO: 4086 - RNA, 18 nt, Artificial Sequence
  Antisense oligonucleotide
  misc_feature (1)..(2): BNA scaffold modification
  misc_feature (10)..(10): BNA scaffold modification
  misc_feature (17)..(18): BNA scaffold modification
ctgcccaaugccaucctg

SEQ ID NO: 4087 - RNA, 18 nt, Artificial Sequence
  Antisense oligonucleotide
  misc_feature (1)..(2): BNA scaffold modification
  misc_feature (6)..(6): BNA scaffold modification
  misc_feature (12)..(12): BNA scaffold modification
  misc_feature (17)..(18): BNA scaffold modification
ctgcccaaugccaucctg

SEQ ID NO: 4088 - RNA, 16 nt, Artificial Sequence
  Antisense oligonucleotide
  misc_feature (1)..(1): BNA scaffold modification
  misc_feature (7)..(7): n is inosine, often denoted as i
  misc_feature (16)..(16): BNA scaffold modification
tuugccncugcccaat

SEQ ID NO: 4089 - RNA, 16 nt, Artificial Sequence
  Antisense oligonucleotide
  misc_feature (1)..(1): BNA scaffold modification
  misc_feature (4)..(4): BNA scaffold modification
  misc_feature (7)..(7): n is inosine, often denoted as i
  misc_feature (16)..(16): BNA scaffold modification
tuugccncugcccaat

SEQ ID NO: 4090 - RNA, 16 nt, Artificial Sequence
  Antisense oligonucleotide
  misc_feature (1)..(1): BNA scaffold modification
  misc_feature (7)..(7): n is inosine, often denoted as i
  misc_feature (10)..(10): BNA scaffold modification
  misc_feature (16)..(16): BNA scaffold modification
tuugccncugcccaat

SEQ ID NO: 4091 - RNA, 16 nt, Artificial Sequence
  Antisense oligonucleotide
  misc_feature (1)..(1): BNA scaffold modification
  misc_feature (4)..(4): BNA scaffold modification
  misc_feature (7)..(7): n is inosine, often denoted as i
  misc_feature (10)..(10): BNA scaffold modification
  misc_feature (16)..(16): BNA scaffold modification
tuugccncugcccaat

SEQ ID NO: 4092 - RNA, 16 nt, Artificial Sequence
  Antisense oligonucleotide
  misc_feature (1)..(1): BNA scaffold modification
  misc_feature (7)..(7): n is inosine, often denoted as i
  misc_feature (13)..(13): BNA scaffold modification
  misc_feature (16)..(16): BNA scaffold modification
tuugccncugcccaat

SEQ ID NO: 4093 - RNA, 16 nt, Artificial Sequence
  Antisense oligonucleotide
  misc_feature (1)..(1): BNA scaffold modification
  misc_feature (7)..(7): n is inosine, often denoted as i
  misc_feature (8)..(8): BNA scaffold modification
  misc_feature (13)..(13): BNA scaffold modification
  misc_feature (16)..(16): BNA scaffold modification
tuugccncugcccaat

SEQ ID NO: 4094 - RNA, 16 nt, Artificial Sequence
  Antisense oligonucleotide
  misc_feature (1)..(1): BNA scaffold modification
  misc_feature (7)..(7): n is inosine, often denoted as i
  misc_feature (8)..(8): BNA scaffold modification
  misc_feature (16)..(16): BNA scaffold modification
tuugccncugcccaat

SEQ ID NO: 4095 - RNA, 16 nt, Artificial Sequence
  Antisense oligonucleotide
  misc_feature (1)..(1): BNA scaffold modification
  misc_feature (6)..(6): BNA scaffold modification
  misc_feature (7)..(7): n is inosine, often denoted as i
  misc_feature (12)..(12): BNA scaffold modification
  misc_feature (16)..(16): BNA scaffold modification
tuugccncugcccaat

SEQ ID NO: 4096 - RNA, 16 nt, Artificial Sequence
  Antisense oligonucleotide
  misc_feature (1)..(2): BNA scaffold modification
  misc_feature (7)..(7): n is inosine, often denoted as i
  misc_feature (15)..(16): BNA scaffold modification
ttugccncugcccaat

SEQ ID NO: 4097 - RNA, 16 nt, Artificial Sequence
  Antisense oligonucleotide
  misc_feature (1)..(2): BNA scaffold modification
  misc_feature (7)..(7): n is inosine, often denoted as i
  misc_feature (10)..(10): BNA scaffold modification
  misc_feature (15)..(16): BNA scaffold modification
ttugccncugcccaat

SEQ ID NO: 4098 - RNA, 16 nt, Artificial Sequence
  Antisense oligonucleotide
  misc_feature (1)..(2): BNA scaffold modification
  misc_feature (7)..(7): n is inosine, often denoted as i
  misc_feature (8)..(8): BNA scaffold modification
  misc_feature (15)..(16): BNA scaffold modification
ttugccncugcccaat

SEQ ID NO: 4099 - RNA, 16 nt, Artificial Sequence
  Antisense oligonucleotide
  misc_feature (1)..(1): BNA scaffold modification
  misc_feature (6)..(6): n is inosine, often denoted as i
  misc_feature (16)..(16): BNA scaffold modification
tugccncugcccaaug

SEQ ID NO: 4100 - RNA, 16 nt, Artificial Sequence
  Antisense oligonucleotide
  misc_feature (1)..(1): BNA scaffold modification
  misc_feature (6)..(6): n is inosine, often denoted as i
  misc_feature (12)..(12): BNA scaffold modification
  misc_feature (16)..(16): BNA scaffold modification
tugccncugcccaaug

SEQ ID NO: 4101 - RNA, 16 nt, Artificial Sequence
  Antisense oligonucleotide
  misc_feature (1)..(1): BNA scaffold modification
  misc_feature (6)..(6): n is inosine, often denoted as i
  misc_feature (9)..(9): BNA scaffold modification
  misc_feature (16)..(16): BNA scaffold modification
tugccncugcccaaug

SEQ ID NO: 4102 - RNA, 16 nt, Artificial Sequence
  Antisense oligonucleotide
  misc_feature (1)..(1): BNA scaffold modification
  misc_feature (6)..(6): n is inosine, often denoted as i
  misc_feature (7)..(7): BNA scaffold modification
  misc_feature (16)..(16): BNA scaffold modification
tugccncugcccaaug

SEQ ID NO: 4103 - RNA, 16 nt, Artificial Sequence
  Antisense oligonucleotide
  misc_feature (1)..(1): BNA scaffold modification
  misc_feature (3)..(3): BNA scaffold modification
  misc_feature (6)..(6): n is inosine, often denoted as i
  misc_feature (16)..(16): BNA scaffold modification
tugccncugcccaaug

SEQ ID NO: 4104 - RNA, 16 nt, Artificial Sequence
  Antisense oligonucleotide
  misc_feature (1)..(1): BNA scaffold modification
  misc_feature (3)..(3): BNA scaffold modification
  misc_feature (6)..(6): n is inosine, often denoted as i
  misc_feature (9)..(9): BNA scaffold modification
  misc_feature (16)..(16): BNA scaffold modification
tugccncugcccaaug

SEQ ID NO: 4105 - RNA, 16 nt, Artificial Sequence
  Antisense oligonucleotide
  misc_feature (1)..(1): BNA scaffold modification
  misc_feature (6)..(6): n is inosine, often denoted as i
  misc_feature (7)..(7): BNA scaffold modification
  misc_feature (12)..(12): BNA scaffold modification
  misc_feature (16)..(16): BNA scaffold modification
tugccncugcccaaug

SEQ ID NO: 4106 - RNA, 16 nt, Artificial Sequence
  Antisense oligonucleotide
  misc_feature (1)..(1): BNA scaffold modification
  misc_feature (4)..(4): BNA scaffold modification
  misc_feature (6)..(6): n is inosine, often denoted as i
  misc_feature (9)..(9): BNA scaffold modification
  misc_feature (12)..(12): BNA scaffold modification
  misc_feature (16)..(16): BNA scaffold modification
tugccncugcccaaug

SEQ ID NO: 4107 - RNA, 16 nt, Artificial Sequence
  Antisense oligonucleotide
  misc_feature (1)..(2): BNA scaffold modification
  misc_feature (6)..(6): n is inosine, often denoted as i
  misc_feature (9)..(9): BNA scaffold modification
  misc_feature (15)..(16): BNA scaffold modification
ttgccncugcccaatg

SEQ ID NO: 4108 - RNA, 16 nt, Artificial Sequence
  Antisense oligonucleotide
  misc_feature (1)..(2): BNA scaffold modification
  misc_feature (6)..(6): n is inosine, often denoted as i
  misc_feature (15)..(16): BNA scaffold modification
ttgccncugcccaatg

SEQ ID NO: 4109 - RNA, 16 nt, Artificial Sequence
  Antisense oligonucleotide
  misc_feature (1)..(2): BNA scaffold modification
  misc_feature (6)..(6): n is inosine, often denoted as i
  misc_feature (7)..(7): BNA scaffold modification
  misc_feature (12)..(12): BNA scaffold modification
  misc_feature (15)..(16): BNA scaffold modification
ttgccncugcccaatg

SEQ ID NO: 4110 - RNA, 16 nt, Artificial Sequence
  Antisense oligonucleotide
  misc_feature (1)..(1): BNA scaffold modification
  misc_feature (5)..(5): n is inosine, often denoted as i
  misc_feature (16)..(16): BNA scaffold modification
tgccncugcccaaugc

SEQ ID NO: 4111 - RNA, 16 nt, Artificial Sequence
  Antisense oligonucleotide
  misc_feature (1)..(1): BNA scaffold modification
  misc_feature (5)..(5): n is inosine, often denoted as i
  misc_feature (15)..(16): BNA scaffold modification
tgccncugcccaaugc

SEQ ID NO: 4112 - RNA, 16 nt, Artificial Sequence
  Antisense oligonucleotide
  misc_feature (1)..(1): BNA scaffold modification
  misc_feature (5)..(5): n is inosine, often denoted as i
  misc_feature (8)..(8): BNA scaffold modification
  misc_feature (16)..(16): BNA scaffold modification
tgccncugcccaaugc

SEQ ID NO: 4113 - RNA, 16 nt, Artificial Sequence
  Antisense oligonucleotide
  misc_feature (1)..(2): BNA scaffold modification
  misc_feature (5)..(5): n is inosine, often denoted as i
  misc_feature (16)..(16): BNA scaffold modification
tgccncugcccaaugc

SEQ ID NO: 4114 - RNA, 16 nt, Artificial Sequence
  Antisense oligonucleotide
  misc_feature (1)..(1): BNA scaffold modification
  misc_feature (5)..(5): n is inosine, often denoted as i
  misc_feature (8)..(8): BNA scaffold modification
  misc_feature (15)..(16): BNA scaffold modification
tgccncugcccaaugc

SEQ ID NO: 4115 - RNA, 16 nt, Artificial Sequence
  Antisense oligonucleotide
  misc_feature (1)..(2): BNA scaffold modification
  misc_feature (5)..(5): n is inosine, often denoted as i
  misc_feature (8)..(8): BNA scaffold modification
  misc_feature (16)..(16): BNA scaffold modification
tgccncugcccaaugc

SEQ ID NO: 4116 - RNA, 16 nt, Artificial Sequence
  Antisense oligonucleotide
  misc_feature (1)..(1): BNA scaffold modification
  misc_feature (5)..(5): n is inosine, often denoted as i
  misc_feature (6)..(6): BNA scaffold modification
  misc_feature (16)..(16): BNA scaffold modification
tgccncugcccaaugc

SEQ ID NO: 4117 - RNA, 16 nt, Artificial Sequence
  Antisense oligonucleotide
  misc_feature (1)..(1): BNA scaffold modification
  misc_feature (5)..(5): n is inosine, often denoted as i
  misc_feature (11)..(11): BNA scaffold modification
  misc_feature (16)..(16): BNA scaffold modification
tgccncugcccaaugc

SEQ ID NO: 4118 - RNA, 16 nt, Artificial Sequence
  Antisense oligonucleotide
  misc_feature (1)..(1): BNA scaffold modification
  misc_feature (5)..(5): n is inosine, often denoted as i
  misc_feature (6)..(6): BNA scaffold modification
  misc_feature (11)..(11): BNA scaffold modification
  misc_feature (16)..(16): BNA scaffold modification
tgccncugcccaaugc

SEQ ID NO: 4119 - RNA, 16 nt, Artificial Sequence
  Antisense oligonucleotide
  misc_feature (1)..(2): BNA scaffold modification
  misc_feature (5)..(5): n is inosine, often denoted as i
  misc_feature (15)..(16): BNA scaffold modification
tgccncugcccaaugc

SEQ ID NO: 4120 - RNA, 16 nt, Artificial Sequence
  Antisense oligonucleotide
  misc_feature (1)..(2): BNA scaffold modification
  misc_feature (5)..(5): n is inosine, often denoted as i
  misc_feature (8)..(8): BNA scaffold modification
  misc_feature (15)..(16): BNA scaffold modification
tgccncugcccaaugc

SEQ ID NO: 4121 - RNA, 16 nt, Artificial Sequence
  Antisense oligonucleotide
  misc_feature (1)..(2): BNA scaffold modification
  misc_feature (5)..(5): n is inosine, often denoted as i
  misc_feature (8)..(8): BNA scaffold modification
  misc_feature (11)..(11): BNA scaffold modification
  misc_feature (15)..(16): BNA scaffold modification
tgccncugcccaaugc

SEQ ID NO: 4122 - RNA, 16 nt, Artificial Sequence
  Antisense oligonucleotide
  misc_feature (1)..(1): BNA scaffold modification
  misc_feature (4)..(4): n is inosine, often denoted as i
  misc_feature (16)..(16): BNA scaffold modification
gccncugcccaaugcc

SEQ ID NO: 4123 - RNA, 16 nt, Artificial Sequence
  Antisense oligonucleotide
  misc_feature (1)..(1): BNA scaffold modification
  misc_feature (4)..(4): n is inosine, often denoted as i
  misc_feature (7)..(7): BNA scaffold modification
  misc_feature (16)..(16): BNA scaffold modification
gccncugcccaaugcc

SEQ ID NO: 4124 - RNA, 16 nt, Artificial Sequence
  Antisense oligonucleotide
  misc_feature (1)..(1): BNA scaffold modification
  misc_feature (4)..(4): n is inosine, often denoted as i
  misc_feature (14)..(14): BNA scaffold modification
  misc_feature (16)..(16): BNA scaffold modification
gccncugcccaaugcc

SEQ ID NO: 4125 - RNA, 16 nt, Artificial Sequence
  Antisense oligonucleotide
  misc_feature (1)..(1): BNA scaffold modification
  misc_feature (4)..(4): n is inosine, often denoted as i
  misc_feature (7)..(7): BNA scaffold modification
  misc_feature (14)..(14): BNA scaffold modification
  misc_feature (16)..(16): BNA scaffold modification
gccncugcccaaugcc

SEQ ID NO: 4126 - RNA, 16 nt, Artificial Sequence
  Antisense oligonucleotide
  misc_feature (1)..(1): BNA scaffold modification
  misc_feature (4)..(4): n is inosine, often denoted as i
  misc_feature (10)..(10): BNA scaffold modification
  misc_feature (16)..(16): BNA scaffold modification
gccncugcccaaugcc

SEQ ID NO: 4127 - RNA, 16 nt, Artificial Sequence
  Antisense oligonucleotide
  misc_feature (1)..(1): BNA scaffold modification
  misc_feature (4)..(4): n is inosine, often denoted as i
  misc_feature (5)..(5): BNA scaffold modification
  misc_feature (16)..(16): BNA scaffold modification
gccncugcccaaugcc

SEQ ID NO: 4128 - RNA, 16 nt, Artificial Sequence
  Antisense oligonucleotide
  misc_feature (1)..(1): BNA scaffold modification
  misc_feature (4)..(4): n is inosine, often denoted as i
  misc_feature (5)..(5): BNA scaffold modification
  misc_feature (10)..(10): BNA scaffold modification
  misc_feature (16)..(16): BNA scaffold modification
gccncugcccaaugcc

SEQ ID NO: 4129 - RNA, 16 nt, Artificial Sequence
  Antisense oligonucleotide
  misc_feature (1)..(1): BNA scaffold modification
  misc_feature (4)..(4): n is inosine, often denoted as i
  misc_feature (5)..(5): BNA scaffold modification
  misc_feature (7)..(7): BNA scaffold modification
  misc_feature (14)..(14): BNA scaffold modification
  misc_feature (16)..(16): BNA scaffold modification
gccncugcccaaugcc

SEQ ID NO: 4130 - RNA, 16 nt, Artificial Sequence
  Antisense oligonucleotide
  misc_feature (1)..(2): BNA scaffold modification
  misc_feature (4)..(4): n is inosine, often denoted as i
  misc_feature (15)..(16): BNA scaffold modification
gccncugcccaaugcc

SEQ ID NO: 4131 - RNA, 16 nt, Artificial Sequence
  Antisense oligonucleotide
  misc_feature (1)..(2): BNA scaffold modification
  misc_feature (4)..(4): n is inosine, often denoted as i
  misc_feature (7)..(7): BNA scaffold modification
  misc_feature (10)..(10): BNA scaffold modification
  misc_feature (15)..(16): BNA scaffold modification
gccncugcccaaugcc

SEQ ID NO: 4132 - RNA, 16 nt, Artificial Sequence
  Antisense oligonucleotide
  misc_feature (1)..(2): BNA scaffold modification
  misc_feature (4)..(4): n is inosine, often denoted as i
  misc_feature (5)..(5): BNA scaffold modification
  misc_feature (10)..(10): BNA scaffold modification
  misc_feature (15)..(16): BNA scaffold modification
gccncugcccaaugcc

SEQ ID NO: 4133 - RNA, 16 nt, Artificial Sequence
  Antisense oligonucleotide
  misc_feature (1)..(1): BNA scaffold modification
  misc_feature (3)..(3): n is inosine, often denoted as i
  misc_feature (16)..(16): BNA scaffold modification
ccncugcccaaugcca

SEQ ID NO: 4134 - RNA, 16 nt, Artificial Sequence
  Antisense oligonucleotide
  misc_feature (1)..(1): BNA scaffold modification
  misc_feature (3)..(3): n is inosine, often denoted as i
  misc_feature (6)..(6): BNA scaffold modification
  misc_feature (16)..(16): BNA scaffold modification
ccncugcccaaugcca

SEQ ID NO: 4135 - RNA, 16 nt, Artificial Sequence
  Antisense oligonucleotide
  misc_feature (1)..(1): BNA scaffold modification
  misc_feature (3)..(3): n is inosine, often denoted as i
  misc_feature (13)..(13): BNA scaffold modification
  misc_feature (16)..(16): BNA scaffold modification
ccncugcccaaugcca

SEQ ID NO: 4136 - RNA, 16 nt, Artificial Sequence
  Antisense oligonucleotide
  misc_feature (1)..(1): BNA scaffold modification
  misc_feature (3)..(3): n is inosine, often denoted as i
  misc_feature (6)..(6): BNA scaffold modification
  misc_feature (13)..(13): BNA scaffold modification
  misc_feature (16)..(16): BNA scaffold modification
ccncugcccaaugcca

SEQ ID NO: 4137 - RNA, 16 nt, Artificial Sequence
  Antisense oligonucleotide
  misc_feature (1)..(1): BNA scaffold modification
  misc_feature (3)..(3): n is inosine, often denoted as i
  misc_feature (9)..(9): BNA scaffold modification
  misc_feature (16)..(16): BNA scaffold modification
ccncugcccaaugcca

SEQ ID NO: 4138 - RNA, 16 nt, Artificial Sequence
  Antisense oligonucleotide
  misc_feature (1)..(1): BNA scaffold modification
  misc_feature (3)..(3): n is inosine, often denoted as i
  misc_feature (4)..(4): BNA scaffold modification
  misc_feature (16)..(16): BNA scaffold modification
ccncugcccaaugcca

SEQ ID NO: 4139 - RNA, 16 nt, Artificial Sequence
  Antisense oligonucleotide
  misc_feature (1)..(1): BNA scaffold modification
  misc_feature (3)..(3): n is inosine, often denoted as i
  misc_feature (4)..(4): BNA scaffold modification
  misc_feature (9)..(9): BNA scaffold modification
  misc_feature (16)..(16): BNA scaffold modification
ccncugcccaaugcca

SEQ ID NO: 4140 - RNA, 16 nt, Artificial Sequence
  Antisense oligonucleotide
  misc_feature (1)..(2): BNA scaffold modification
  misc_feature (3)..(3): n is inosine, often denoted as i
  misc_feature (15)..(16): BNA scaffold modification
ccncugcccaaugcca

SEQ ID NO: 4141 - RNA, 16 nt, Artificial Sequence
  Antisense oligonucleotide
  misc_feature (1)..(2): BNA scaffold modification
  misc_feature (3)..(3): n is inosine, often denoted as i
  misc_feature (6)..(6): BNA scaffold modification
  misc_feature (15)..(16): BNA scaffold modification
ccncugcccaaugcca

SEQ ID NO: 4142 - RNA, 16 nt, Artificial Sequence
  Antisense oligonucleotide
  misc_feature (1)..(2): BNA scaffold modification
  misc_feature (3)..(3): n is inosine, often denoted as i
  misc_feature (9)..(9): BNA scaffold modification
  misc_feature (15)..(16): BNA scaffold modification
ccncugcccaaugcca

SEQ ID NO: 4143 - RNA, 16 nt, Artificial Sequence
  Antisense oligonucleotide
  misc_feature (1)..(2): BNA scaffold modification
  misc_feature (3)..(3): n is inosine, often denoted as i
  misc_feature (8)..(9): BNA scaffold modification
  misc_feature (15)..(16): BNA scaffold modification
ccncugcccaaugcca

SEQ ID NO: 4144 - RNA, 16 nt, Artificial Sequence
  Antisense oligonucleotide
  misc_feature (1)..(1): BNA scaffold modification
  misc_feature (2)..(2): n is inosine, often denoted as i
  misc_feature (16)..(16): BNA scaffold modification
cncugcccaaugccat

SEQ ID NO: 4145 - RNA, 16 nt, Artificial Sequence
  Antisense oligonucleotide
  misc_feature (1)..(1): BNA scaffold modification
  misc_feature (2)..(2): n is inosine, often denoted as i
  misc_feature (12)..(12): BNA scaffold modification
  misc_feature (16)..(16): BNA scaffold modification
cncugcccaaugccat

SEQ ID NO: 4146 - RNA, 16 nt, Artificial Sequence
  Antisense oligonucleotide
  misc_feature (1)..(1): BNA scaffold modification
  misc_feature (2)..(2): n is inosine, often denoted as i
  misc_feature (5)..(5): BNA scaffold modification
  misc_feature (16)..(16): BNA scaffold modification
cncugcccaaugccat

SEQ ID NO: 4147 - RNA, 16 nt, Artificial Sequence
  Antisense oligonucleotide
  misc_feature (1)..(1): BNA scaffold modification
  misc_feature (2)..(2): n is inosine, often denoted as i
  misc_feature (5)..(5): BNA scaffold modification
  misc_feature (12)..(12): BNA scaffold modification
  misc_feature (16)..(16): BNA scaffold modification
cncugcccaaugccat

SEQ ID NO: 4148 - RNA, 16 nt, Artificial Sequence
  Antisense oligonucleotide
  misc_feature (1)..(1): BNA scaffold modification
  misc_feature (2)..(2): n is inosine, often denoted as i
  misc_feature (16)..(16): BNA scaffold modification
cncugcccaaugccat

SEQ ID NO: 4149 - RNA, 16 nt, Artificial Sequence
  Antisense oligonucleotide
  misc_feature (1)..(1): BNA scaffold modification
  misc_feature (2)..(2): n is inosine, often denoted as i
  misc_feature (8)..(8): BNA scaffold modification
  misc_feature (16)..(16): BNA scaffold modification
cncugcccaaugccat

SEQ ID NO: 4150 - RNA, 16 nt, Artificial Sequence
  Antisense oligonucleotide
  misc_feature (1)..(1): BNA scaffold modification
  misc_feature (2)..(2): n is inosine, often denoted as i
  misc_feature (3)..(3): BNA scaffold modification
  misc_feature (16)..(16): BNA scaffold modification
cncugcccaaugccat

SEQ ID NO: 4151 - RNA, 16 nt, Artificial Sequence
  Antisense oligonucleotide
  misc_feature (1)..(1): BNA scaffold modification
  misc_feature (2)..(2): n is inosine, often denoted as i
  misc_feature (3)..(3): BNA scaffold modification
  misc_feature (8)..(8): BNA scaffold modification
  misc_feature (16)..(16): BNA scaffold modification
cncugcccaaugccat

SEQ ID NO: 4152 - RNA, 16 nt, Artificial Sequence
  Antisense oligonucleotide
  misc_feature (1)..(1): BNA scaffold modification
  misc_feature (2)..(2): n is inosine, often denoted as i
  misc_feature (8)..(8): BNA scaffold modification
  misc_feature (14)..(14): BNA scaffold modification
  misc_feature (16)..(16): BNA scaffold modification
cncugcccaaugccat

SEQ ID NO: 4153 - RNA, 16 nt, Artificial Sequence
  Antisense oligonucleotide
  misc_feature (1)..(1): BNA scaffold modification
  misc_feature (2)..(2): n is inosine, often denoted as i
  misc_feature (3)..(3): BNA scaffold modification
  misc_feature (12)..(12): BNA scaffold modification
  misc_feature (15)..(16): BNA scaffold modification
cncugcccaaugccat

SEQ ID NO: 4154 - RNA, 16 nt, Artificial Sequence
  Antisense oligonucleotide
  misc_feature (1)..(1): BNA scaffold modification
  misc_feature (2)..(2): n is inosine, often denoted as i
  misc_feature (3)..(3): BNA scaffold modification
  misc_feature (5)..(5): BNA scaffold modification
  misc_feature (12)..(12): BNA scaffold modification
  misc_feature (15)..(16): BNA scaffold modification
cncugcccaaugccat

SEQ ID NO: 4155 - RNA, 16 nt, Artificial Sequence
  Antisense oligonucleotide
  misc_feature (1)..(1): n is inosine, often denoted as i
  misc_feature (2)..(2): BNA scaffold modification
  misc_feature (16)..(16): BNA scaffold modification
ncugcccaaugccauc

SEQ ID NO: 4156 - RNA, 16 nt, Artificial Sequence
  Antisense oligonucleotide
  misc_feature (1)..(1): n is inosine, often denoted as i
  misc_feature (2)..(2): BNA scaffold modification
  misc_feature (11)..(11): BNA scaffold modification
  misc_feature (16)..(16): BNA scaffold modification
ncugcccaaugccauc

SEQ ID NO: 4157 - RNA, 16 nt, Artificial Sequence
  Antisense oligonucleotide
  misc_feature (1)..(1): n is inosine, often denoted as i
  misc_feature (2)..(2): BNA scaffold modification
  misc_feature (4)..(4): BNA scaffold modification
  misc_feature (16)..(16): BNA scaffold modification
ncugcccaaugccauc

SEQ ID NO: 4158 - RNA, 16 nt, Artificial Sequence
  Antisense oligonucleotide
  misc_feature (1)..(1): n is inosine, often denoted as i
  misc_feature (2)..(2): BNA scaffold modification
  misc_feature (4)..(4): BNA scaffold modification
  misc_feature (11)..(11): BNA scaffold modification
  misc_feature (16)..(16): BNA scaffold modification
ncugcccaaugccauc

SEQ ID NO: 4159 - RNA, 16 nt, Artificial Sequence
  Antisense oligonucleotide
  misc_feature (1)..(1): n is inosine, often denoted as i
  misc_feature (2)..(2): BNA scaffold modification
  misc_feature (13)..(13): BNA scaffold modification
  misc_feature (16)..(16): BNA scaffold modification
ncugcccaaugccauc

SEQ ID NO: 4160 - RNA, 16 nt, Artificial Sequence
  Antisense oligonucleotide
  misc_feature (1)..(1): n is inosine, often denoted as i
  misc_feature (2)..(2): BNA scaffold modification
  misc_feature (7)..(7): BNA scaffold modification
  misc_feature (16)..(16): BNA scaffold modification
ncugcccaaugccauc

SEQ ID NO: 4161 - RNA, 16 nt, Artificial Sequence
  Antisense oligonucleotide
  misc_feature (1)..(1): n is inosine, often denoted as i
  misc_feature (2)..(2): BNA scaffold modification
  misc_feature (7)..(7): BNA scaffold modification
  misc_feature (13)..(13): BNA scaffold modification
  misc_feature (16)..(16): BNA scaffold modification
ncugcccaaugccauc

SEQ ID NO: 4162 - RNA, 16 nt, Artificial Sequence
  Antisense oligonucleotide
  misc_feature (1)..(1): n is inosine, often denoted as i
  misc_feature (2)..(2): BNA scaffold modification
  misc_feature (6)..(6): BNA scaffold modification
  misc_feature (12)..(12): BNA scaffold modification
  misc_feature (16)..(16): BNA scaffold modification
ncugcccaaugccauc

SEQ ID NO: 4163 - RNA, 16 nt, Artificial Sequence
  Antisense oligonucleotide
  misc_feature (1)..(1): n is inosine, often denoted as i
  misc_feature (2)..(2): BNA scaffold modification
  misc_feature (15)..(16): BNA scaffold modification
ncugcccaaugccatc

SEQ ID NO: 4164 - RNA, 16 nt, Artificial Sequence
  Antisense oligonucleotide
  misc_feature (1)..(1): n is inosine, often denoted as i
  misc_feature (2)..(2): BNA scaffold modification
  misc_feature (11)..(11): BNA scaffold modification
  misc_feature (15)..(16): BNA scaffold modification
ncugcccaaugccatc

SEQ ID NO: 4165 - RNA, 16 nt, Artificial Sequence
  Antisense oligonucleotide
  misc_feature (1)..(1): n is inosine, often denoted as i
  misc_feature (2)..(2): BNA scaffold modification
  misc_feature (4)..(4): BNA scaffold modification
  misc_feature (7)..(7): BNA scaffold modification
  misc_feature (15)..(16): BNA scaffold modification
ncugcccaaugccatc

SEQ ID NO: 4166 - RNA, 16 nt, Artificial Sequence
  Antisense oligonucleotide
  misc_feature (1)..(1): BNA scaffold modification
  misc_feature (16)..(16): BNA scaffold modification
cugcccaaugccaucc

SEQ ID NO: 4167 - RNA, 16 nt, Artificial Sequence
  Antisense oligonucleotide
  misc_feature (1)..(1): BNA scaffold modification
  misc_feature (3)..(3): BNA scaffold modification
  misc_feature (16)..(16): BNA scaffold modification
cugcccaaugccaucc

SEQ ID NO: 4168 - RNA, 16 nt, Artificial Sequence
  Antisense oligonucleotide
  misc_feature (1)..(1): BNA scaffold modification
  misc_feature (10)..(10): BNA scaffold modification
  misc_feature (16)..(16): BNA scaffold modification
cugcccaaugccaucc

SEQ ID NO: 4169 - RNA, 16 nt, Artificial Sequence
  Antisense oligonucleotide
  misc_feature (1)..(1): BNA scaffold modification
  misc_feature (3)..(3): BNA scaffold modification
  misc_feature (10)..(10): BNA scaffold modification
  misc_feature (16)..(16): BNA scaffold modification
cugcccaaugccaucc

SEQ ID NO: 4170 - RNA, 16 nt, Artificial Sequence
  Antisense oligonucleotide
  misc_feature (1)..(1): BNA scaffold modification
  misc_feature (12)..(12): BNA scaffold modification
  misc_feature (16)..(16): BNA scaffold modification
cugcccaaugccaucc

SEQ ID NO: 4171 - RNA, 16 nt, Artificial Sequence
  Antisense oligonucleotide
  misc_feature (1)..(1): BNA scaffold modification
  misc_feature (6)..(6): BNA scaffold modification
  misc_feature (16)..(16): BNA scaffold modification
cugcccaaugccaucc

SEQ ID NO: 4172 - RNA, 16 nt, Artificial Sequence
  Antisense oligonucleotide
  misc_feature (1)..(1): BNA scaffold modification
  misc_feature (6)..(6): BNA scaffold modification
  misc_feature (12)..(12): BNA scaffold modification
  misc_feature (16)..(16): BNA scaffold modification
cugcccaaugccaucc

SEQ ID NO: 4173 - RNA, 16 nt, Artificial Sequence
  Antisense oligonucleotide
  misc_feature (1)..(1): BNA scaffold modification
  misc_feature (3)..(3): BNA scaffold modification
  misc_feature (6)..(6): BNA scaffold modification
  misc_feature (10)..(10): BNA scaffold modification
  misc_feature (16)..(16): BNA scaffold modification
cugcccaaugccaucc

SEQ ID NO: 4174 - RNA, 16 nt, Artificial Sequence
  Antisense oligonucleotide
  misc_feature (1)..(1): BNA scaffold modification
  misc_feature (6)..(6): BNA scaffold modification
  misc_feature (10)..(10): BNA scaffold modification
  misc_feature (15)..(16): BNA scaffold modification
cugcccaaugccaucc

SEQ ID NO: 4175 - RNA, 16 nt, Artificial Sequence
  Antisense oligonucleotide
  misc_feature (1)..(2): BNA scaffold modification
  misc_feature (15)..(16): BNA scaffold modification
ctgcccaaugccaucc

SEQ ID NO: 4176 - RNA, 16 nt, Artificial Sequence
  Antisense oligonucleotide
  misc_feature (1)..(2): BNA scaffold modification
  misc_feature (6)..(6): BNA scaffold modification
  misc_feature (10)..(10): BNA scaffold modification
  misc_feature (15)..(16): BNA scaffold modification
ctgcccaaugccaucc

SEQ ID NO: 4177 - RNA, 16 nt, Artificial Sequence
  Antisense oligonucleotide
  misc_feature (1)..(1): BNA scaffold modification
  misc_feature (16)..(16): BNA scaffold modification
tgcccaaugccaucct

SEQ ID NO: 4178 - RNA, 16 nt, Artificial Sequence
  Antisense oligonucleotide
  misc_feature (1)..(1): BNA scaffold modification
  misc_feature (9)..(9): BNA scaffold modification
  misc_feature (16)..(16): BNA scaffold modification
tgcccaaugccaucct

SEQ ID NO: 4179 - RNA, 16 nt, Artificial Sequence
  Antisense oligonucleotide
  misc_feature (1)..(1): BNA scaffold modification
  misc_feature (11)..(11): BNA scaffold modification
  misc_feature (16)..(16): BNA scaffold modification
tgcccaaugccaucct

SEQ ID NO: 4180 - RNA, 16 nt, Artificial Sequence
  Antisense oligonucleotide
  misc_feature (1)..(1): BNA scaffold modification
  misc_feature (5)..(5): BNA scaffold modification
  misc_feature (16)..(16): BNA scaffold modification
tgcccaaugccaucct

SEQ ID NO: 4181 - RNA, 16 nt, Artificial Sequence
  Antisense oligonucleotide
  misc_feature (1)..(1): BNA scaffold modification
  misc_feature (5)..(5): BNA scaffold modification
  misc_feature (11)..(11): BNA scaffold modification
  misc_feature (16)..(16): BNA scaffold modification
tgcccaaugccaucct

SEQ ID NO: 4182 - RNA, 16 nt, Artificial Sequence
  Antisense oligonucleotide
  misc_feature (1)..(1): BNA scaffold modification
  misc_feature (3)..(3): BNA scaffold modification
  misc_feature (14)..(14): BNA scaffold modification
  misc_feature (16)..(16): BNA scaffold modification
tgcccaaugccaucct

SEQ ID NO: 4183 - RNA, 16 nt, Artificial Sequence
  Antisense oligonucleotide
  misc_feature (1)..(1): BNA scaffold modification
  misc_feature (5)..(5): BNA scaffold modification
  misc_feature (11)..(11): BNA scaffold modification
  misc_feature (15)..(16): BNA scaffold modification
tgcccaaugccaucct

SEQ ID NO: 4184 - RNA, 16 nt, Artificial Sequence
  Antisense oligonucleotide
  misc_feature (1)..(2): BNA scaffold modification
  misc_feature (15)..(16): BNA scaffold modification
tgcccaaugccaucct

SEQ ID NO: 4185 - RNA, 16 nt, Artificial Sequence
  Antisense oligonucleotide
  misc_feature (1)..(2): BNA scaffold modification
  misc_feature (9)..(9): BNA scaffold modification
  misc_feature (15)..(16): BNA scaffold modification
tgcccaaugccaucct

SEQ ID NO: 4186 - RNA, 16 nt, Artificial Sequence
  Antisense oligonucleotide
  misc_feature (1)..(2): BNA scaffold modification
  misc_feature (5)..(5): BNA scaffold modification
  misc_feature (11)..(11): BNA scaffold modification
  misc_feature (15)..(16): BNA scaffold modification
tgcccaaugccaucct

SEQ ID NO: 4187 - RNA, 16 nt, Artificial Sequence
  Antisense oligonucleotide
  misc_feature (1)..(2): BNA scaffold modification
  misc_feature (9)..(10): BNA scaffold modification
  misc_feature (15)..(16): BNA scaffold modification
tgcccaaugccaucct

SEQ ID NO: 4188 - RNA, 16 nt, Artificial Sequence
  Antisense oligonucleotide
  misc_feature (1)..(1): BNA scaffold modification
  misc_feature (16)..(16): BNA scaffold modification
gcccaaugccauccug

SEQ ID NO: 4189 - RNA, 16 nt, Artificial Sequence
  Antisense oligonucleotide
  misc_feature (1)..(1): BNA scaffold modification
  misc_feature (8)..(8): BNA scaffold modification
  misc_feature (16)..(16): BNA scaffold modification
gcccaaugccauccug

SEQ ID NO: 4190 - RNA, 16 nt, Artificial Sequence
  Antisense oligonucleotide
  misc_feature (1)..(1): BNA scaffold modification
  misc_feature (14)..(14): BNA scaffold modification
  misc_feature (16)..(16): BNA scaffold modification
gcccaaugccauccug

SEQ ID NO: 4191 - RNA, 16 nt, Artificial Sequence
  Antisense oligonucleotide
  misc_feature (1)..(1): BNA scaffold modification
  misc_feature (10)..(10): BNA scaffold modification
  misc_feature (14)..(14): BNA scaffold modification
  misc_feature (16)..(16): BNA scaffold modification
gcccaaugccauccug

SEQ ID NO: 4192 - RNA, 16 nt, Artificial Sequence
  Antisense oligonucleotide
  misc_feature (1)..(1): BNA scaffold modification
  misc_feature (10)..(10): BNA scaffold modification
  misc_feature (16)..(16): BNA scaffold modification
gcccaaugccauccug

SEQ ID NO: 4193 - RNA, 16 nt, Artificial Sequence
  Antisense oligonucleotide
  misc_feature (1)..(1): BNA scaffold modification
  misc_feature (4)..(4): BNA scaffold modification
  misc_feature (10)..(10): BNA scaffold modification
  misc_feature (16)..(16): BNA scaffold modification
gcccaaugccauccug

SEQ ID NO: 4194 - RNA, 16 nt, Artificial Sequence
  Antisense oligonucleotide
  misc_feature (1)..(1): BNA scaffold modification
  misc_feature (4)..(4): BNA scaffold modification
  misc_feature (8)..(8): BNA scaffold modification
  misc_feature (13)..(13): BNA scaffold modification
  misc_feature (16)..(16): BNA scaffold modification
gcccaaugccauccug

SEQ ID NO: 4195 - RNA, 16 nt, Artificial Sequence
  Antisense oligonucleotide
  misc_feature (1)..(2): BNA scaffold modification
  misc_feature (15)..(16): BNA scaffold modification
gcccaaugccaucctg

SEQ ID NO: 4196 - RNA, 16 nt, Artificial Sequence
  Antisense oligonucleotide
  misc_feature (1)..(2): BNA scaffold modification
  misc_feature (8)..(8): BNA scaffold modification
  misc_feature (15)..(16): BNA scaffold modification
gcccaaugccaucctg

SEQ ID NO: 4197 - RNA, 16 nt, Artificial Sequence
  Antisense oligonucleotide
  misc_feature (1)..(2): BNA scaffold modification
  misc_feature (4)..(4): BNA scaffold modification
  misc_feature (10)..(10): BNA scaffold modification
  misc_feature (15)..(16): BNA scaffold modification
gcccaaugccaucctg

SEQ ID NO: 4198 - RNA, 22 nt, Artificial Sequence
  Antisense oligonucleotide
  misc_feature (1)..(1): BNA scaffold modification
  misc_feature (22)..(22): BNA scaffold modification
caauguucugacaacaguuugc

SEQ ID NO: 4199 - RNA, 22 nt, Artificial Sequence
  Antisense oligonucleotide
  misc_feature (1)..(1): BNA scaffold modification
  misc_feature (5)..(5): BNA scaffold modification
  misc_feature (22)..(22): BNA scaffold modification
caauguucugacaacaguuugc

SEQ ID NO: 4200 - RNA, 22 nt, Artificial Sequence
  Antisense oligonucleotide
  misc_feature (1)..(1): BNA scaffold modification
  misc_feature (10)..(10): BNA scaffold modification
  misc_feature (22)..(22): BNA scaffold modification
caauguucugacaacaguuugc

SEQ ID NO: 4201 - RNA, 22 nt, Artificial Sequence
  Antisense oligonucleotide
  misc_feature (1)..(1): BNA scaffold modification
  misc_feature (17)..(17): BNA scaffold modification
  misc_feature (22)..(22): BNA scaffold modification
caauguucugacaacaguuugc

SEQ ID NO: 4202 - RNA, 22 nt, Artificial Sequence
  Antisense oligonucleotide
  misc_feature (1)..(1): BNA scaffold modification
  misc_feature (10)..(10): BNA scaffold modification
  misc_feature (17)..(17): BNA scaffold modification
  misc_feature (22)..(22): BNA scaffold modification
caauguucugacaacaguuugc

SEQ ID NO: 4203 - RNA, 22 nt, Artificial Sequence
  Antisense oligonucleotide
  misc_feature (1)..(1): BNA scaffold modification
  misc_feature (5)..(5): BNA scaffold modification
  misc_feature (10)..(10): BNA scaffold modification
  misc_feature (22)..(22): BNA scaffold modification
caauguucugacaacaguuugc

SEQ ID NO: 4204 - RNA, 22 nt, Artificial Sequence
  Antisense oligonucleotide
  misc_feature (1)..(1): BNA scaffold modification
  misc_feature (5)..(5): BNA scaffold modification
  misc_feature (17)..(17): BNA scaffold modification
  misc_feature (22)..(22): BNA scaffold modification
caauguucugacaacaguuugc

SEQ ID NO: 4205 - RNA, 22 nt, Artificial Sequence
  Antisense oligonucleotide
  misc_feature (1)..(1): BNA scaffold modification
  misc_feature (15)..(15): BNA scaffold modification
  misc_feature (22)..(22): BNA scaffold modification
caauguucugacaacaguuugc

SEQ ID NO: 4206 - RNA, 22 nt, Artificial Sequence
  Antisense oligonucleotide
  misc_feature (1)..(1): BNA scaffold modification
  misc_feature (12)..(12): BNA scaffold modification
  misc_feature (22)..(22): BNA scaffold modification
caauguucugacaacaguuugc

SEQ ID NO: 4207 - RNA, 22 nt, Artificial Sequence
  Antisense oligonucleotide
  misc_feature (1)..(1): BNA scaffold modification
  misc_feature (8)..(8): BNA scaffold modification
  misc_feature (22)..(22): BNA scaffold modification
caauguucugacaacaguuugc

SEQ ID NO: 4208 - RNA, 22 nt, Artificial Sequence
  Antisense oligonucleotide
  misc_feature (1)..(1): BNA scaffold modification
  misc_feature (8)..(8): BNA scaffold modification
  misc_feature (12)..(12): BNA scaffold modification
  misc_feature (22)..(22): BNA scaffold modification
caauguucugacaacaguuugc

SEQ ID NO: 4209 - RNA, 22 nt, Artificial Sequence
  Antisense oligonucleotide
  misc_feature (1)..(1): BNA scaffold modification
  misc_feature (8)..(8): BNA scaffold modification
  misc_feature (15)..(15): BNA scaffold modification
  misc_feature (22)..(22): BNA scaffold modification
caauguucugacaacaguuugc

SEQ ID NO: 4210 - RNA, 22 nt, Artificial Sequence
  Antisense oligonucleotide
  misc_feature (1)..(1): BNA scaffold modification
  misc_feature (5)..(5): BNA scaffold modification
  misc_feature (10)..(10): BNA scaffold modification
  misc_feature (17)..(17): BNA scaffold modification
  misc_feature (22)..(22): BNA scaffold modification
caauguucugacaacaguuugc

SEQ ID NO: 4211 - RNA, 22 nt, Artificial Sequence
  Antisense oligonucleotide
  misc_feature (1)..(2): BNA scaffold modification
  misc_feature (10)..(10): BNA scaffold modification
  misc_feature (21)..(22): BNA scaffold modification
caauguucugacaacaguuugc

SEQ ID NO: 4212 - RNA, 22 nt, Artificial Sequence
  Antisense oligonucleotide
  misc_feature (1)..(2): BNA scaffold modification
  misc_feature (17)..(17): BNA scaffold modification
  misc_feature (21)..(22): BNA scaffold modification
caauguucugacaacaguuugc

SEQ ID NO: 4213 - RNA, 22 nt, Artificial Sequence
  Antisense oligonucleotide
  misc_feature (1)..(2): BNA scaffold modification
  misc_feature (5)..(5): BNA scaffold modification
  misc_feature (17)..(17): BNA scaffold modification
  misc_feature (21)..(22): BNA scaffold modification
caauguucugacaacaguuugc

SEQ ID NO: 4214 - RNA, 20 nt, Artificial Sequence
  Antisense oligonucleotide
  misc_feature (1)..(1): BNA scaffold modification
  misc_feature (20)..(20): BNA scaffold modification
caauguucugacaacaguut

SEQ ID NO: 4215 - RNA, 20 nt, Artificial Sequence
  Antisense oligonucleotide
  misc_feature (1)..(1): BNA scaffold modification
  misc_feature (5)..(5): BNA scaffold modification
  misc_feature (20)..(20): BNA scaffold modification
caauguucugacaacaguut

SEQ ID NO: 4216 - RNA, 20 nt, Artificial Sequence
  Antisense oligonucleotide
  misc_feature (1)..(1): BNA scaffold modification
  misc_feature (10)..(10): BNA scaffold modification
  misc_feature (20)..(20): BNA scaffold modification
caauguucugacaacaguut

SEQ ID NO: 4217 - RNA, 20 nt, Artificial Sequence
  Antisense oligonucleotide
  misc_feature (1)..(1): BNA scaffold modification
  misc_feature (17)..(17): BNA scaffold modification
  misc_feature (20)..(20): BNA scaffold modification
caauguucugacaacaguut

SEQ ID NO: 4218 - RNA, 20 nt, Artificial Sequence
  Antisense oligonucleotide
  misc_feature (1)..(1): BNA scaffold modification
  misc_feature (10)..(10): BNA scaffold modification
  misc_feature (17)..(17): BNA scaffold modification
  misc_feature (20)..(20): BNA scaffold modification
caauguucugacaacaguut

SEQ ID NO: 4219 - RNA, 20 nt, Artificial Sequence
  Antisense oligonucleotide
  misc_feature (1)..(1): BNA scaffold modification
  misc_feature (5)..(5): BNA scaffold modification
  misc_feature (10)..(10): BNA scaffold modification
  misc_feature (20)..(20): BNA scaffold modification
caauguucugacaacaguut

SEQ ID NO: 4220 - RNA, 20 nt, Artificial Sequence
  Antisense oligonucleotide
  misc_feature (1)..(1): BNA scaffold modification
  misc_feature (5)..(5): BNA scaffold modification
  misc_feature (17)..(17): BNA scaffold modification
  misc_feature (20)..(20): BNA scaffold modification
caauguucugacaacaguut

SEQ ID NO: 4221 - RNA, 20 nt, Artificial Sequence
  Antisense oligonucleotide
  misc_feature (1)..(1): BNA scaffold modification
  misc_feature (20)..(20): BNA scaffold modification
caauguucugacaacaguut

SEQ ID NO: 4222 - RNA, 20 nt, Artificial Sequence
  Antisense oligonucleotide
  misc_feature (1)..(1): BNA scaffold modification
  misc_feature (15)..(15): BNA scaffold modification
  misc_feature (20)..(20): BNA scaffold modification
caauguucugacaacaguut

SEQ ID NO: 4223 - RNA, 20 nt, Artificial Sequence
  Antisense oligonucleotide
  misc_feature (1)..(1): BNA scaffold modification
  misc_feature (8)..(8): BNA scaffold modification
  misc_feature (12)..(12): BNA scaffold modification
  misc_feature (20)..(20): BNA scaffold modification
caauguucugacaacaguut

SEQ ID NO: 4224 - RNA, 20 nt, Artificial Sequence
  Antisense oligonucleotide
  misc_feature (1)..(1): BNA scaffold modification
  misc_feature (8)..(8): BNA scaffold modification
  misc_feature (15)..(15): BNA scaffold modification
  misc_feature (20)..(20): BNA scaffold modification
caauguucugacaacaguut

SEQ ID NO: 4225 - RNA, 20 nt, Artificial Sequence
  Antisense oligonucleotide
  misc_feature (1)..(2): BNA scaffold modification
  misc_feature (19)..(20): BNA scaffold modification
caauguucugacaacagutt

SEQ ID NO: 4226 - RNA, 20 nt, Artificial Sequence
  Antisense oligonucleotide
  misc_feature (1)..(2): BNA scaffold modification
  misc_feature (10)..(10): BNA scaffold modification
  misc_feature (19)..(20): BNA scaffold modification
caauguucugacaacagutt

SEQ ID NO: 4227 - RNA, 20 nt, Artificial Sequence
  Antisense oligonucleotide
  misc_feature (1)..(2): BNA scaffold modification
  misc_feature (8)..(8): BNA scaffold modification
  misc_feature (15)..(15): BNA scaffold modification
  misc_feature (19)..(20): BNA scaffold modification
caauguucugacaacagutt

SEQ ID NO: 4228 - RNA, 20 nt, Artificial Sequence
  Antisense oligonucleotide
  misc_feature (1)..(1): BNA scaffold modification
  misc_feature (20)..(20): BNA scaffold modification
aauguucugacaacaguuug

SEQ ID NO: 4229 - RNA, 20 nt, Artificial Sequence
  Antisense oligonucleotide
  misc_feature (1)..(1): BNA scaffold modification
  misc_feature (16)..(16): BNA scaffold modification
  misc_feature (20)..(20): BNA scaffold modification
aauguucugacaacaguuug

SEQ ID NO: 4230 - RNA, 20 nt, Artificial Sequence
  Antisense oligonucleotide
  misc_feature (1)..(1): BNA scaffold modification
  misc_feature (9)..(9): BNA scaffold modification
  misc_feature (20)..(20): BNA scaffold modification
aauguucugacaacaguuug

SEQ ID NO: 4231 - RNA, 20 nt, Artificial Sequence
  Antisense oligonucleotide
  misc_feature (1)..(1): BNA scaffold modification
  misc_feature (4)..(4): BNA scaffold modification
  misc_feature (20)..(20): BNA scaffold modification
aauguucugacaacaguuug

SEQ ID NO: 4232 - RNA, 20 nt, Artificial Sequence
  Antisense oligonucleotide
  misc_feature (1)..(1): BNA scaffold modification
  misc_feature (4)..(4): BNA scaffold modification
  misc_feature (9)..(9): BNA scaffold modification
  misc_feature (20)..(20): BNA scaffold modification
aauguucugacaacaguuug

SEQ ID NO: 4233 - RNA, 20 nt, Artificial Sequence
  Antisense oligonucleotide
  misc_feature (1)..(1): BNA scaffold modification
  misc_feature (9)..(9): BNA scaffold modification
  misc_feature (16)..(16): BNA scaffold modification
  misc_feature (20)..(20): BNA scaffold modification
aauguucugacaacaguuug

SEQ ID NO: 4234 - RNA, 20 nt, Artificial Sequence
  Antisense oligonucleotide
  misc_feature (1)..(1): BNA scaffold modification
  misc_feature (4)..(4): BNA scaffold modification
  misc_feature (16)..(16): BNA scaffold modification
  misc_feature (20)..(20): BNA scaffold modification
aauguucugacaacaguuug

SEQ ID NO: 4235 - RNA, 20 nt, Artificial Sequence
  Antisense oligonucleotide
  misc_feature (1)..(1): BNA scaffold modification
  misc_feature (14)..(14): BNA scaffold modification
  misc_feature (20)..(20): BNA scaffold modification
aauguucugacaacaguuug

SEQ ID NO: 4236 - RNA, 20 nt, Artificial Sequence
  Antisense oligonucleotide
  misc_feature (1)..(1): BNA scaffold modification
  misc_feature (11)..(11): BNA scaffold modification
  misc_feature (20)..(20): BNA scaffold modification
aauguucugacaacaguuug

SEQ ID NO: 4237 - RNA, 20 nt, Artificial Sequence
  Antisense oligonucleotide
  misc_feature (1)..(1): BNA scaffold modification
  misc_feature (7)..(7): BNA scaffold modification
  misc_feature (20)..(20): BNA scaffold modification
aauguucugacaacaguuug

SEQ ID NO: 4238 - RNA, 20 nt, Artificial Sequence
  Antisense oligonucleotide
  misc_feature (1)..(1): BNA scaffold modification
  misc_feature (7)..(7): BNA scaffold modification
  misc_feature (11)..(11): BNA scaffold modification
  misc_feature (20)..(20): BNA scaffold modification
aauguucugacaacaguuug

SEQ ID NO: 4239 - RNA, 20 nt, Artificial Sequence
  Antisense oligonucleotide
  misc_feature (1)..(1): BNA scaffold modification
  misc_feature (7)..(7): BNA scaffold modification
  misc_feature (14)..(14): BNA scaffold modification
  misc_feature (20)..(20): BNA scaffold modification
aauguucugacaacaguuug

SEQ ID NO: 4240 - RNA, 20 nt, Artificial Sequence
  Antisense oligonucleotide
  misc_feature (1)..(2): BNA scaffold modification
  misc_feature (7)..(7): BNA scaffold modification
  misc_feature (14)..(14): BNA scaffold modification
  misc_feature (19)..(20): BNA scaffold modification
aauguucugacaacaguutg

SEQ ID NO: 4241 - RNA, 20 nt, Artificial Sequence
  Antisense oligonucleotide
  misc_feature (1)..(2): BNA scaffold modification
  misc_feature (19)..(20): BNA scaffold modification
aauguucugacaacaguutg

SEQ ID NO: 4242 - RNA, 20 nt, Artificial Sequence
  Antisense oligonucleotide
  misc_feature (1)..(2): BNA scaffold modification
  misc_feature (9)..(9): BNA scaffold modification
  misc_feature (19)..(20): BNA scaffold modification
aauguucugacaacaguutg

SEQ ID NO: 4243 - RNA, 20 nt, Artificial Sequence
  Antisense oligonucleotide
  misc_feature (1)..(2): BNA scaffold modification
  misc_feature (9)..(9): BNA scaffold modification
  misc_feature (16)..(16): BNA scaffold modification
  misc_feature (19)..(20): BNA scaffold modification
aauguucugacaacaguutg

SEQ ID NO: 4244 - RNA, 20 nt, Artificial Sequence
  Antisense oligonucleotide
  misc_feature (1)..(1): BNA scaffold modification
  misc_feature (20)..(20): BNA scaffold modification
auguucugacaacaguuugc

SEQ ID NO: 4245 - RNA, 20 nt, Artificial Sequence
  Antisense oligonucleotide
  misc_feature (1)..(1): BNA scaffold modification
  misc_feature (3)..(3): BNA scaffold modification
  misc_feature (20)..(20): BNA scaffold modification
auguucugacaacaguuugc

SEQ ID NO: 4246 - RNA, 20 nt, Artificial Sequence
  Antisense oligonucleotide
  misc_feature (1)..(1): BNA scaffold modification
  misc_feature (8)..(8): BNA scaffold modification
  misc_feature (20)..(20): BNA scaffold modification
auguucugacaacaguuugc

SEQ ID NO: 4247 - RNA, 20 nt, Artificial Sequence
  Antisense oligonucleotide
  misc_feature (1)..(1): BNA scaffold modification
  misc_feature (15)..(15): BNA scaffold modification
  misc_feature (20)..(20): BNA scaffold modification
auguucugacaacaguuugc

SEQ ID NO: 4248 - RNA, 20 nt, Artificial Sequence
  Antisense oligonucleotide
  misc_feature (1)..(1): BNA scaffold modification
  misc_feature (8)..(8): BNA scaffold modification
  misc_feature (15)..(15): BNA scaffold modification
  misc_feature (20)..(20): BNA scaffold modification
auguucugacaacaguuugc

SEQ ID NO: 4249 - RNA, 20 nt, Artificial Sequence
  Antisense oligonucleotide
  misc_feature (1)..(1): BNA scaffold modification
  misc_feature (3)..(3): BNA scaffold modification
  misc_feature (8)..(8): BNA scaffold modification
  misc_feature (20)..(20): BNA scaffold modification
auguucugacaacaguuugc

SEQ ID NO: 4250 - RNA, 20 nt, Artificial Sequence
  Antisense oligonucleotide
  misc_feature (1)..(1): BNA scaffold modification
  misc_feature (6)..(6): BNA scaffold modification
  misc_feature (20)..(20): BNA scaffold modification
auguucugacaacaguuugc

SEQ ID NO: 4251 - RNA, 20 nt, Artificial Sequence
  Antisense oligonucleotide
  misc_feature (1)..(1): BNA scaffold modification
  misc_feature (10)..(10): BNA scaffold modification
  misc_feature (20)..(20): BNA scaffold modification
auguucugacaacaguuugc

SEQ ID NO: 4252 - RNA, 20 nt, Artificial Sequence
  Antisense oligonucleotide
  misc_feature (1)..(1): BNA scaffold modification
  misc_feature (13)..(13): BNA scaffold modification
  misc_feature (20)..(20): BNA scaffold modification
auguucugacaacaguuugc

SEQ ID NO: 4253 - RNA, 20 nt, Artificial Sequence
  Antisense oligonucleotide
  misc_feature (1)..(1): BNA scaffold modification
  misc_feature (6)..(6): BNA scaffold modification
  misc_feature (13)..(13): BNA scaffold modification
  misc_feature (20)..(20): BNA scaffold modification
auguucugacaacaguuugc

SEQ ID NO: 4254 - RNA, 20 nt, Artificial Sequence
  Antisense oligonucleotide
  misc_feature (1)..(1): BNA scaffold modification
  misc_feature (20)..(20): BNA scaffold modification
auguucugacaacaguuugc

SEQ ID NO: 4255 - RNA, 20 nt, Artificial Sequence
  Antisense oligonucleotide
  misc_feature (1)..(2): BNA scaffold modification
  misc_feature (19)..(20): BNA scaffold modification
atguucugacaacaguuugc

SEQ ID NO: 4256 - RNA, 20 nt, Artificial Sequence
  Antisense oligonucleotide
  misc_feature (1)..(2): BNA scaffold modification
  misc_feature (8)..(8): BNA scaffold modification
  misc_feature (19)..(20): BNA scaffold modification
atguucugacaacaguuugc

SEQ ID NO: 4257 - RNA, 20 nt, Artificial Sequence
  Antisense oligonucleotide
  misc_feature (1)..(2): BNA scaffold modification
  misc_feature (8)..(8): BNA scaffold modification
  misc_feature (15)..(15): BNA scaffold modification
  misc_feature (19)..(20): BNA scaffold modification
atguucugacaacaguuugc

SEQ ID NO: 4258 - RNA, 18 nt, Artificial Sequence
  Antisense oligonucleotide
  misc_feature (1)..(1): BNA scaffold modification
  misc_feature (5)..(5): BNA scaffold modification
  misc_feature (18)..(18): BNA scaffold modification
caauguucugacaacagt

SEQ ID NO: 4259 - RNA, 18 nt, Artificial Sequence
  Antisense oligonucleotide
  misc_feature (1)..(1): BNA scaffold modification
  misc_feature (10)..(10): BNA scaffold modification
  misc_feature (18)..(18): BNA scaffold modification
caauguucugacaacagt

SEQ ID NO: 4260 - RNA, 18 nt, Artificial Sequence
  Antisense oligonucleotide
  misc_feature (1)..(1): BNA scaffold modification
  misc_feature (5)..(5): BNA scaffold modification
  misc_feature (10)..(10): BNA scaffold modification
  misc_feature (18)..(18): BNA scaffold modification
caauguucugacaacagt

SEQ ID NO: 4261 - RNA, 18 nt, Artificial Sequence
  Antisense oligonucleotide
  misc_feature (1)..(1): BNA scaffold modification
  misc_feature (12)..(12): BNA scaffold modification
  misc_feature (15)..(15): BNA scaffold modification
  misc_feature (18)..(18): BNA scaffold modification
caauguucugacaacagt

SEQ ID NO: 4262 - RNA, 18 nt, Artificial Sequence
  Antisense oligonucleotide
  misc_feature (1)..(1): BNA scaffold modification
  misc_feature (12)..(12): BNA scaffold modification
  misc_feature (18)..(18): BNA scaffold modification
caauguucugacaacagt

SEQ ID NO: 4263 - RNA, 18 nt, Artificial Sequence
  Antisense oligonucleotide
  misc_feature (1)..(1): BNA scaffold modification
  misc_feature (8)..(8): BNA scaffold modification
  misc_feature (12)..(12): BNA scaffold modification
  misc_feature (18)..(18): BNA scaffold modification
caauguucugacaacagt

SEQ ID NO: 4264 - RNA, 18 nt, Artificial Sequence
  Antisense oligonucleotide
  misc_feature (1)..(1): BNA scaffold modification
  misc_feature (5)..(5): BNA scaffold modification
  misc_feature (10)..(10): BNA scaffold modification
  misc_feature (15)..(15): BNA scaffold modification
  misc_feature (18)..(18): BNA scaffold modification
caauguucugacaacagt

SEQ ID NO: 4265 - RNA, 18 nt, Artificial Sequence
  Antisense oligonucleotide
  misc_feature (1)..(2): BNA scaffold modification
  misc_feature (17)..(18): BNA scaffold modification
caauguucugacaacagt

SEQ ID NO: 4266 - RNA, 18 nt, Artificial Sequence
  Antisense oligonucleotide
  misc_feature (1)..(2): BNA scaffold modification
  misc_feature (10)..(10): BNA scaffold modification
  misc_feature (17)..(18): BNA scaffold modification
caauguucugacaacagt

SEQ ID NO: 4267 - RNA, 18 nt, Artificial Sequence
  Antisense oligonucleotide
  misc_feature (1)..(2): BNA scaffold modification
  misc_feature (5)..(5): BNA scaffold modification
  misc_feature (10)..(10): BNA scaffold modification
  misc_feature (17)..(18): BNA scaffold modification
caauguucugacaacagt

SEQ ID NO: 4268 - RNA, 18 nt, Artificial Sequence
  Antisense oligonucleotide
  misc_feature (1)..(1): BNA scaffold modification
  misc_feature (18)..(18): BNA scaffold modification
aauguucugacaacagut

SEQ ID NO: 4269 - RNA, 18 nt, Artificial Sequence
  Antisense oligonucleotide
  misc_feature (1)..(1): BNA scaffold modification
  misc_feature (4)..(4): BNA scaffold modification
  misc_feature (18)..(18): BNA scaffold modification
aauguucugacaacagut

SEQ ID NO: 4270 - RNA, 18 nt, Artificial Sequence
  Antisense oligonucleotide
  misc_feature (1)..(1): BNA scaffold modification
  misc_feature (9)..(9): BNA scaffold modification
  misc_feature (18)..(18): BNA scaffold modification
aauguucugacaacagut

SEQ ID NO: 4271 - RNA, 18 nt, Artificial Sequence
  Antisense oligonucleotide
  misc_feature (1)..(1): BNA scaffold modification
  misc_feature (16)..(16): BNA scaffold modification
  misc_feature (18)..(18): BNA scaffold modification
aauguucugacaacagut

SEQ ID NO: 4272 - RNA, 18 nt, Artificial Sequence
  Antisense oligonucleotide
  misc_feature (1)..(1): BNA scaffold modification
  misc_feature (3)..(3): BNA scaffold modification
  misc_feature (16)..(16): BNA scaffold modification
  misc_feature (18)..(18): BNA scaffold modification
aauguucugacaacagut

SEQ ID NO: 4273 - RNA, 18 nt, Artificial Sequence
  Antisense oligonucleotide
  misc_feature (1)..(1): BNA scaffold modification
  misc_feature (4)..(4): BNA scaffold modification
  misc_feature (9)..(9): BNA scaffold modification
  misc_feature (18)..(18): BNA scaffold modification
aauguucugacaacagut

SEQ ID NO: 4274 - RNA, 18 nt, Artificial Sequence
  Antisense oligonucleotide
  misc_feature (1)..(1): BNA scaffold modification
  misc_feature (9)..(9): BNA scaffold modification
  misc_feature (16)..(16): BNA scaffold modification
  misc_feature (18)..(18): BNA scaffold modification
aauguucugacaacagut

SEQ ID NO: 4275 - RNA, 18 nt, Artificial Sequence
  Antisense oligonucleotide
  misc_feature (1)..(1): BNA scaffold modification
  misc_feature (14)..(14): BNA scaffold modification
  misc_feature (18)..(18): BNA scaffold modification
aauguucugacaacagut

SEQ ID NO: 4276 - RNA, 18 nt, Artificial Sequence
  Antisense oligonucleotide
  misc_feature (1)..(1): BNA scaffold modification
  misc_feature (7)..(7): BNA scaffold modification
  misc_feature (18)..(18): BNA scaffold modification
aauguucugacaacagut

SEQ ID NO: 4277 - RNA, 18 nt, Artificial Sequence
  Antisense oligonucleotide
  misc_feature (1)..(1): BNA scaffold modification
  misc_feature (7)..(7): BNA scaffold modification
  misc_feature (14)..(14): BNA scaffold modification
  misc_feature (18)..(18): BNA scaffold modification
aauguucugacaacagut

SEQ ID NO: 4278 - RNA, 18 nt, Artificial Sequence
  Antisense oligonucleotide
  misc_feature (1)..(2): BNA scaffold modification
  misc_feature (17)..(18): BNA scaffold modification
aauguucugacaacagtt

SEQ ID NO: 4279 - RNA, 18 nt, Artificial Sequence
  Antisense oligonucleotide
  misc_feature (1)..(2): BNA scaffold modification
  misc_feature (9)..(9): BNA scaffold modification
  misc_feature (17)..(18): BNA scaffold modification
aauguucugacaacagtt

SEQ ID NO: 4280 - RNA, 18 nt, Artificial Sequence
  Antisense oligonucleotide
  misc_feature (1)..(2): BNA scaffold modification
  misc_feature (4)..(4): BNA scaffold modification
  misc_feature (9)..(9): BNA scaffold modification
  misc_feature (17)..(18): BNA scaffold modification
aauguucugacaacagtt

SEQ ID NO: 4281 - RNA, 18 nt, Artificial Sequence
  Antisense oligonucleotide
  misc_feature (1)..(1): BNA scaffold modification
  misc_feature (18)..(18): BNA scaffold modification
auguucugacaacaguut

SEQ ID NO: 4282 - RNA, 18 nt, Artificial Sequence
  Antisense oligonucleotide
  misc_feature (1)..(1): BNA scaffold modification
  misc_feature (3)..(3): BNA scaffold modification
  misc_feature (18)..(18): BNA scaffold modification
auguucugacaacaguut

SEQ ID NO: 4283 - RNA, 18 nt, Artificial Sequence
  Antisense oligonucleotide
  misc_feature (1)..(1): BNA scaffold modification
  misc_feature (8)..(8): BNA scaffold modification
  misc_feature (18)..(18): BNA scaffold modification
auguucugacaacaguut

SEQ ID NO: 4284 - RNA, 18 nt, Artificial Sequence
  Antisense oligonucleotide
  misc_feature (1)..(1): BNA scaffold modification
  misc_feature (15)..(15): BNA scaffold modification
  misc_feature (18)..(18): BNA scaffold modification
auguucugacaacaguut

SEQ ID NO: 4285 - RNA, 18 nt, Artificial Sequence
  Antisense oligonucleotide
  misc_feature (1)..(1): BNA scaffold modification
  misc_feature (8)..(8): BNA scaffold modification
  misc_feature (15)..(15): BNA scaffold modification
  misc_feature (18)..(18): BNA scaffold modification
auguucugacaacaguut

SEQ ID NO: 4286 - RNA, 18 nt, Artificial Sequence
  Antisense oligonucleotide
  misc_feature (1)..(1): BNA scaffold modification
  misc_feature (3)..(3): BNA scaffold modification
  misc_feature (8)..(8): BNA scaffold modification
  misc_feature (18)..(18): BNA scaffold modification
auguucugacaacaguut

SEQ ID NO: 4287 - RNA, 18 nt, Artificial Sequence
  Antisense oligonucleotide
  misc_feature (1)..(1): BNA scaffold modification
  misc_feature (3)..(3): BNA scaffold modification
  misc_feature (15)..(15): BNA scaffold modification
  misc_feature (18)..(18): BNA scaffold modification
auguucugacaacaguut

SEQ ID NO: 4288 - RNA, 18 nt, Artificial Sequence
  Antisense oligonucleotide
  misc_feature (1)..(1): BNA scaffold modification
  misc_feature (13)..(13): BNA scaffold modification
  misc_feature (18)..(18): BNA scaffold modification
auguucugacaacaguut

SEQ ID NO: 4289 - RNA, 18 nt, Artificial Sequence
  Antisense oligonucleotide
  misc_feature (1)..(1): BNA scaffold modification
  misc_feature (10)..(10): BNA scaffold modification
  misc_feature (18)..(18): BNA scaffold modification
auguucugacaacaguut

SEQ ID NO: 4290 - RNA, 18 nt, Artificial Sequence
  Antisense oligonucleotide
  misc_feature (1)..(1): BNA scaffold modification
  misc_feature (6)..(6): BNA scaffold modification
  misc_feature (18)..(18): BNA scaffold modification
auguucugacaacaguut

SEQ ID NO: 4291 - RNA, 18 nt, Artificial Sequence
  Antisense oligonucleotide
  misc_feature (1)..(1): BNA scaffold modification
  misc_feature (6)..(6): BNA scaffold modification
  misc_feature (13)..(13): BNA scaffold modification
  misc_feature (18)..(18): BNA scaffold modification
auguucugacaacaguut

SEQ ID NO: 4292 - RNA, 18 nt, Artificial Sequence
  Antisense oligonucleotide
  misc_feature (1)..(1): BNA scaffold modification
  misc_feature (6)..(6): BNA scaffold modification
  misc_feature (10)..(10): BNA scaffold modification
  misc_feature (18)..(18): BNA scaffold modification
auguucugacaacaguut

SEQ ID NO: 4293 - RNA, 18 nt, Artificial Sequence
  Antisense oligonucleotide
  misc_feature (1)..(2): BNA scaffold modification
  misc_feature (17)..(18): BNA scaffold modification
atguucugacaacagutt

SEQ ID NO: 4294 - RNA, 18 nt, Artificial Sequence
  Antisense oligonucleotide
  misc_feature (1)..(2): BNA scaffold modification
  misc_feature (8)..(8): BNA scaffold modification
  misc_feature (17)..(18): BNA scaffold modification
atguucugacaacagutt

SEQ ID NO: 4295 - RNA, 18 nt, Artificial Sequence
  Antisense oligonucleotide
  misc_feature (1)..(2): BNA scaffold modification
  misc_feature (8)..(8): BNA scaffold modification
  misc_feature (13)..(13): BNA scaffold modification
  misc_feature (17)..(18): BNA scaffold modification
atguucugacaacagutt

SEQ ID NO: 4296 - RNA, 18 nt, Artificial Sequence
  Antisense oligonucleotide
  misc_feature (1)..(1): BNA scaffold modification
  misc_feature (18)..(18): BNA scaffold modification
tguucugacaacaguuug

SEQ ID NO: 4297 - RNA, 18 nt, Artificial Sequence
  Antisense oligonucleotide
  misc_feature (1)..(1): BNA scaffold modification
  misc_feature (18)..(18): BNA scaffold modification
tguucugacaacaguuug

SEQ ID NO: 4298 - RNA, 18 nt, Artificial Sequence
  Antisense oligonucleotide
  misc_feature (1)..(2): BNA scaffold modification
  misc_feature (18)..(18): BNA scaffold modification
tguucugacaacaguuug

SEQ ID NO: 4299 - RNA, 18 nt, Artificial Sequence
  Antisense oligonucleotide
  misc_feature (1)..(1): BNA scaffold modification
  misc_feature (7)..(7): BNA scaffold modification
  misc_feature (18)..(18): BNA scaffold modification
tguucugacaacaguuug

SEQ ID NO: 4300 - RNA, 18 nt, Artificial Sequence
  Antisense oligonucleotide
  misc_feature (1)..(1): BNA scaffold modification
  misc_feature (14)..(14): BNA scaffold modification
  misc_feature (18)..(18): BNA scaffold modification
tguucugacaacaguuug

SEQ ID NO: 4301 - RNA, 18 nt, Artificial Sequence
  Antisense oligonucleotide
  misc_feature (1)..(1): BNA scaffold modification
  misc_feature (7)..(7): BNA scaffold modification
  misc_feature (14)..(14): BNA scaffold modification
  misc_feature (18)..(18): BNA scaffold modification
tguucugacaacaguuug

SEQ ID NO: 4302 - RNA, 18 nt, Artificial Sequence
  Antisense oligonucleotide
  misc_feature (1)..(1): BNA scaffold modification
  misc_feature (5)..(5): BNA scaffold modification
  misc_feature (18)..(18): BNA scaffold modification
tguucugacaacaguuug

SEQ ID NO: 4303 - RNA, 18 nt, Artificial Sequence
  Antisense oligonucleotide
  misc_feature (1)..(1): BNA scaffold modification
  misc_feature (9)..(9): BNA scaffold modification
  misc_feature (18)..(18): BNA scaffold modification
tguucugacaacaguuug

SEQ ID NO: 4304 - RNA, 18 nt, Artificial Sequence
  Antisense oligonucleotide
  misc_feature (1)..(1): BNA scaffold modification
  misc_feature (12)..(12): BNA scaffold modification
  misc_feature (18)..(18): BNA scaffold modification
tguucugacaacaguuug

SEQ ID NO: 4305 - RNA, 18 nt, Artificial Sequence
  Antisense oligonucleotide
  misc_feature (1)..(1): BNA scaffold modification
  misc_feature (5)..(5): BNA scaffold modification
  misc_feature (12)..(12): BNA scaffold modification
  misc_feature (18)..(18): BNA scaffold modification
tguucugacaacaguuug

SEQ ID NO: 4306 - RNA, 18 nt, Artificial Sequence
  Antisense oligonucleotide
  misc_feature (1)..(2): BNA scaffold modification
  misc_feature (17)..(18): BNA scaffold modification
tguucugacaacaguutg

SEQ ID NO: 4307 - RNA, 18 nt, Artificial Sequence
  Antisense oligonucleotide
  misc_feature (1)..(2): BNA scaffold modification
  misc_feature (7)..(7): BNA scaffold modification
  misc_feature (17)..(18): BNA scaffold modification
tguucugacaacaguutg

SEQ ID NO: 4308 - RNA, 18 nt, Artificial Sequence
  Antisense oligonucleotide
  misc_feature (1)..(2): BNA scaffold modification
  misc_feature (7)..(7): BNA scaffold modification
  misc_feature (12)..(12): BNA scaffold modification
  misc_feature (17)..(18): BNA scaffold modification
tguucugacaacaguutg

SEQ ID NO: 4309 - RNA, 18 nt, Artificial Sequence
  Antisense oligonucleotide
  misc_feature (1)..(1): BNA scaffold modification
  misc_feature (18)..(18): BNA scaffold modification
guucugacaacaguuugc

SEQ ID NO: 4310 - RNA, 18 nt, Artificial Sequence
  Antisense oligonucleotide
  misc_feature (1)..(1): BNA scaffold modification
  misc_feature (4)..(4): BNA scaffold modification
  misc_feature (18)..(18): BNA scaffold modification
guucugacaacaguuugc

SEQ ID NO: 4311 - RNA, 18 nt, Artificial Sequence
  Antisense oligonucleotide
  misc_feature (1)..(1): BNA scaffold modification
  misc_feature (8)..(8): BNA scaffold modification
  misc_feature (18)..(18): BNA scaffold modification
guucugacaacaguuugc

SEQ ID NO: 4312 - RNA, 18 nt, Artificial Sequence
  Antisense oligonucleotide
  misc_feature (1)..(1): BNA scaffold modification
  misc_feature (11)..(11): BNA scaffold modification
  misc_feature (18)..(18): BNA scaffold modification
guucugacaacaguuugc

SEQ ID NO: 4313 - RNA, 18 nt, Artificial Sequence
  Antisense oligonucleotide
  misc_feature (1)..(1): BNA scaffold modification
  misc_feature (4)..(4): BNA scaffold modification
  misc_feature (11)..(11): BNA scaffold modification
  misc_feature (18)..(18): BNA scaffold modification
guucugacaacaguuugc

SEQ ID NO: 4314 - RNA, 18 nt, Artificial Sequence
  Antisense oligonucleotide
  misc_feature (1)..(1): BNA scaffold modification
  misc_feature (4)..(4): BNA scaffold modification
  misc_feature (8)..(8): BNA scaffold modification
  misc_feature (18)..(18): BNA scaffold modification
guucugacaacaguuugc

SEQ ID NO: 4315 - RNA, 18 nt, Artificial Sequence
  Antisense oligonucleotide
  misc_feature (1)..(1): BNA scaffold modification
  misc_feature (13)..(13): BNA scaffold modification
  misc_feature (18)..(18): BNA scaffold modification
guucugacaacaguuugc

SEQ ID NO: 4316 - RNA, 18 nt, Artificial Sequence
  Antisense oligonucleotide
  misc_feature (1)..(1): BNA scaffold modification
  misc_feature (6)..(6): BNA scaffold modification
  misc_feature (18)..(18): BNA scaffold modification
guucugacaacaguuugc

SEQ ID NO: 4317 - RNA, 18 nt, Artificial Sequence
  Antisense oligonucleotide
  misc_feature (1)..(1): BNA scaffold modification
  misc_feature (6)..(6): BNA scaffold modification
  misc_feature (13)..(13): BNA scaffold modification
  misc_feature (18)..(18): BNA scaffold modification
guucugacaacaguuugc

SEQ ID NO: 4318 - RNA, 18 nt, Artificial Sequence
  Antisense oligonucleotide
  misc_feature (1)..(2): BNA scaffold modification
  misc_feature (6)..(6): BNA scaffold modification
  misc_feature (13)..(13): BNA scaffold modification
  misc_feature (17)..(18): BNA scaffold modification
gtucugacaacaguuugc

SEQ ID NO: 4319 - RNA, 18 nt, Artificial Sequence
  Antisense oligonucleotide
  misc_feature (1)..(2): BNA scaffold modification
  misc_feature (8)..(8): BNA scaffold modification
  misc_feature (11)..(11): BNA scaffold modification
  misc_feature (17)..(18): BNA scaffold modification
gtucugacaacaguuugc

SEQ ID NO: 4320 - RNA, 16 nt, Artificial Sequence
  Antisense oligonucleotide
  misc_feature (1)..(1): BNA scaffold modification
  misc_feature (16)..(16): BNA scaffold modification
caauguucugacaaca

SEQ ID NO: 4321 - RNA, 16 nt, Artificial Sequence
  Antisense oligonucleotide
  misc_feature (1)..(1): BNA scaffold modification
  misc_feature (5)..(5): BNA scaffold modification
  misc_feature (16)..(16): BNA scaffold modification
caauguucugacaaca

SEQ ID NO: 4322 - RNA, 16 nt, Artificial Sequence
  Antisense oligonucleotide
  misc_feature (1)..(1): BNA scaffold modification
  misc_feature (10)..(10): BNA scaffold modification
  misc_feature (16)..(16): BNA scaffold modification
caauguucugacaaca

SEQ ID NO: 4323 - RNA, 16 nt, Artificial Sequence
  Antisense oligonucleotide
  misc_feature (1)..(1): BNA scaffold modification
  misc_feature (5)..(5): BNA scaffold modification
  misc_feature (10)..(10): BNA scaffold modification
  misc_feature (16)..(16): BNA scaffold modification
caauguucugacaaca

SEQ ID NO: 4324 - RNA, 16 nt, Artificial Sequence
  Antisense oligonucleotide
  misc_feature (1)..(1): BNA scaffold modification
  misc_feature (12)..(12): BNA scaffold modification
  misc_feature (16)..(16): BNA scaffold modification
caauguucugacaaca

SEQ ID NO: 4325 - RNA, 16 nt, Artificial Sequence
  Antisense oligonucleotide
  misc_feature (1)..(1): BNA scaffold modification
  misc_feature (8)..(8): BNA scaffold modification
  misc_feature (16)..(16): BNA scaffold modification
caauguucugacaaca

SEQ ID NO: 4326 - RNA, 16 nt, Artificial Sequence
  Antisense oligonucleotide
  misc_feature (1)..(1): BNA scaffold modification
  misc_feature (8)..(8): BNA scaffold modification
  misc_feature (12)..(12): BNA scaffold modification
  misc_feature (16)..(16): BNA scaffold modification
caauguucugacaaca

SEQ ID NO: 4327 - RNA, 16 nt, Artificial Sequence
  Antisense oligonucleotide
  misc_feature (1)..(2): BNA scaffold modification
  misc_feature (15)..(16): BNA scaffold modification
caauguucugacaaca

SEQ ID NO: 4328 - RNA, 16 nt, Artificial Sequence
  Antisense oligonucleotide
  misc_feature (1)..(2): BNA scaffold modification
  misc_feature (8)..(8): BNA scaffold modification
  misc_feature (15)..(16): BNA scaffold modification
caauguucugacaaca

SEQ ID NO: 4329 - RNA, 16 nt, Artificial Sequence
  Antisense oligonucleotide
  misc_feature (1)..(2): BNA scaffold modification
  misc_feature (5)..(5): BNA scaffold modification
  misc_feature (10)..(10): BNA scaffold modification
  misc_feature (15)..(16): BNA scaffold modification
caauguucugacaaca

SEQ ID NO: 4330 - RNA, 16 nt, Artificial Sequence
  Antisense oligonucleotide
  misc_feature (1)..(1): BNA scaffold modification
  misc_feature (16)..(16): BNA scaffold modification
aauguucugacaacag

SEQ ID NO: 4331 - RNA, 16 nt, Artificial Sequence
  Antisense oligonucleotide
  misc_feature (1)..(1): BNA scaffold modification
  misc_feature (4)..(4): BNA scaffold modification
  misc_feature (16)..(16): BNA scaffold modification
aauguucugacaacag

SEQ ID NO: 4332 - RNA, 16 nt, Artificial Sequence
  Antisense oligonucleotide
  misc_feature (1)..(1): BNA scaffold modification
  misc_feature (9)..(9): BNA scaffold modification
  misc_feature (16)..(16): BNA scaffold modification
aauguucugacaacag

SEQ ID NO: 4333 - RNA, 16 nt, Artificial Sequence
  Antisense oligonucleotide
  misc_feature (1)..(1): BNA scaffold modification
  misc_feature (4)..(4): BNA scaffold modification
  misc_feature (9)..(9): BNA scaffold modification
  misc_feature (16)..(16): BNA scaffold modification
aauguucugacaacag

SEQ ID NO: 4334 - RNA, 16 nt, Artificial Sequence
  Antisense oligonucleotide
  misc_feature (1)..(1): BNA scaffold modification
  misc_feature (14)..(14): BNA scaffold modification
  misc_feature (16)..(16): BNA scaffold modification
aauguucugacaacag

SEQ ID NO: 4335 - RNA, 16 nt, Artificial Sequence
  Antisense oligonucleotide
  misc_feature (1)..(1): BNA scaffold modification
  misc_feature (11)..(11): BNA scaffold modification
  misc_feature (16)..(16): BNA scaffold modification
aauguucugacaacag

SEQ ID NO: 4336 - RNA, 16 nt, Artificial Sequence
  Antisense oligonucleotide
  misc_feature (1)..(1): BNA scaffold modification
  misc_feature (7)..(7): BNA scaffold modification
  misc_feature (16)..(16): BNA scaffold modification
aauguucugacaacag

SEQ ID NO: 4337 - RNA, 16 nt, Artificial Sequence
  Antisense oligonucleotide
  misc_feature (1)..(1): BNA scaffold modification
  misc_feature (7)..(7): BNA scaffold modification
  misc_feature (14)..(14): BNA scaffold modification
  misc_feature (16)..(16): BNA scaffold modification
aauguucugacaacag

SEQ ID NO: 4338 - RNA, 16 nt, Artificial Sequence
  Antisense oligonucleotide
  misc_feature (1)..(1): BNA scaffold modification
  misc_feature (4)..(4): BNA scaffold modification
  misc_feature (11)..(11): BNA scaffold modification
  misc_feature (16)..(16): BNA scaffold modification
aauguucugacaacag

SEQ ID NO: 4339 - RNA, 16 nt, Artificial Sequence
  Antisense oligonucleotide
  misc_feature (1)..(2): BNA scaffold modification
  misc_feature (9)..(9): BNA scaffold modification
  misc_feature (15)..(16): BNA scaffold modification
aauguucugacaacag

SEQ ID NO: 4340 - RNA, 16 nt, Artificial Sequence
  Antisense oligonucleotide
  misc_feature (1)..(2): BNA scaffold modification
  misc_feature (15)..(16): BNA scaffold modification
aauguucugacaacag

SEQ ID NO: 4341 - RNA, 16 nt, Artificial Sequence
  Antisense oligonucleotide
  misc_feature (1)..(2): BNA scaffold modification
  misc_feature (7)..(7): BNA scaffold modification
  misc_feature (11)..(11): BNA scaffold modification
  misc_feature (15)..(16): BNA scaffold modification
aauguucugacaacag

SEQ ID NO: 4342 - RNA, 16 nt, Artificial Sequence
  Antisense oligonucleotide
  misc_feature (1)..(1): BNA scaffold modification
  misc_feature (16)..(16): BNA scaffold modification
auguucugacaacagt

SEQ ID NO: 4343 - RNA, 16 nt, Artificial Sequence
  Antisense oligonucleotide
  misc_feature (1)..(1): BNA scaffold modification
  misc_feature (3)..(3): BNA scaffold modification
  misc_feature (16)..(16): BNA scaffold modification
auguucugacaacagt

SEQ ID NO: 4344 - RNA, 16 nt, Artificial Sequence
  Antisense oligonucleotide
  misc_feature (1)..(1): BNA scaffold modification
  misc_feature (8)..(8): BNA scaffold modification
  misc_feature (16)..(16): BNA scaffold modification
auguucugacaacagt

SEQ ID NO: 4345 - RNA, 16 nt, Artificial Sequence
  Antisense oligonucleotide
  misc_feature (1)..(1): BNA scaffold modification
  misc_feature (3)..(3): BNA scaffold modification
  misc_feature (8)..(8): BNA scaffold modification
  misc_feature (16)..(16): BNA scaffold modification
auguucugacaacagt

SEQ ID NO: 4346 - RNA, 16 nt, Artificial Sequence
  Antisense oligonucleotide
  misc_feature (1)..(1): BNA scaffold modification
  misc_feature (13)..(13): BNA scaffold modification
  misc_feature (16)..(16): BNA scaffold modification
auguucugacaacagt

SEQ ID NO: 4347 - RNA, 16 nt, Artificial Sequence
  Antisense oligonucleotide
  misc_feature (1)..(1): BNA scaffold modification
  misc_feature (10)..(10): BNA scaffold modification
  misc_feature (16)..(16): BNA scaffold modification
auguucugacaacagt

SEQ ID NO: 4348 - RNA, 16 nt, Artificial Sequence
  Antisense oligonucleotide
  misc_feature (1)..(1): BNA scaffold modification
  misc_feature (6)..(6): BNA scaffold modification
  misc_feature (16)..(16): BNA scaffold modification
auguucugacaacagt

SEQ ID NO: 4349 - RNA, 16 nt, Artificial Sequence
  Antisense oligonucleotide
  misc_feature (1)..(1): BNA scaffold modification
  misc_feature (6)..(6): BNA scaffold modification
  misc_feature (13)..(13): BNA scaffold modification
  misc_feature (16)..(16): BNA scaffold modification
auguucugacaacagt

SEQ ID NO: 4350 - RNA, 16 nt, Artificial Sequence
  Antisense oligonucleotide
  misc_feature (1)..(2): BNA scaffold modification
  misc_feature (6)..(6): BNA scaffold modification
  misc_feature (10)..(10): BNA scaffold modification
  misc_feature (15)..(16): BNA scaffold modification
atguucugacaacagt

SEQ ID NO: 4351 - RNA, 16 nt, Artificial Sequence
  Antisense oligonucleotide
  misc_feature (1)..(2): BNA scaffold modification
  misc_feature (8)..(8): BNA scaffold modification
  misc_feature (15)..(16): BNA scaffold modification
atguucugacaacagt

SEQ ID NO: 4352 - RNA, 16 nt, Artificial Sequence
  Antisense oligonucleotide
  misc_feature (1)..(2): BNA scaffold modification
  misc_feature (15)..(16): BNA scaffold modification
atguucugacaacagt

SEQ ID NO: 4353 - RNA, 16 nt, Artificial Sequence
  Antisense oligonucleotide
  misc_feature (1)..(1): BNA scaffold modification
  misc_feature (16)..(16): BNA scaffold modification
tguucugacaacagut

SEQ ID NO: 4354 - RNA, 16 nt, Artificial Sequence
  Antisense oligonucleotide
  misc_feature (1)..(2): BNA scaffold modification
  misc_feature (16)..(16): BNA scaffold modification
tguucugacaacagut

SEQ ID NO: 4355 - RNA, 16 nt, Artificial Sequence
  Antisense oligonucleotide
  misc_feature (1)..(1): BNA scaffold modification
  misc_feature (7)..(7): BNA scaffold modification
  misc_feature (16)..(16): BNA scaffold modification
tguucugacaacagut

SEQ ID NO: 4356 - RNA, 16 nt, Artificial Sequence
  Antisense oligonucleotide
  misc_feature (1)..(1): BNA scaffold modification
  misc_feature (14)..(14): BNA scaffold modification
  misc_feature (16)..(16): BNA scaffold modification
tguucugacaacagut

SEQ ID NO: 4357 - RNA, 16 nt, Artificial Sequence
  Antisense oligonucleotide
  misc_feature (1)..(1): BNA scaffold modification
  misc_feature (7)..(7): BNA scaffold modification
  misc_feature (14)..(14): BNA scaffold modification
  misc_feature (16)..(16): BNA scaffold modification
tguucugacaacagut

SEQ ID NO: 4358 - RNA, 16 nt, Artificial Sequence
  Antisense oligonucleotide
  misc_feature (1)..(1): BNA scaffold modification
  misc_feature (12)..(12): BNA scaffold modification
  misc_feature (16)..(16): BNA scaffold modification
tguucugacaacagut

SEQ ID NO: 4359 - RNA, 16 nt, Artificial Sequence
  Antisense oligonucleotide
  misc_feature (1)..(1): BNA scaffold modification
  misc_feature (9)..(9): BNA scaffold modification
  misc_feature (16)..(16): BNA scaffold modification
tguucugacaacagut

SEQ ID NO: 4360 - RNA, 16 nt, Artificial Sequence
  Antisense oligonucleotide
  misc_feature (1)..(1): BNA scaffold modification
  misc_feature (5)..(5): BNA scaffold modification
  misc_feature (16)..(16): BNA scaffold modification
tguucugacaacagut

SEQ ID NO: 4361 - RNA, 16 nt, Artificial Sequence
  Antisense oligonucleotide
  misc_feature (1)..(1): BNA scaffold modification
  misc_feature (5)..(5): BNA scaffold modification
  misc_feature (12)..(12): BNA scaffold modification
  misc_feature (16)..(16): BNA scaffold modification
tguucugacaacagut

SEQ ID NO: 4362 - RNA, 16 nt, Artificial Sequence
  Antisense oligonucleotide
  misc_feature (1)..(1): BNA scaffold modification
  misc_feature (5)..(5): BNA scaffold modification
  misc_feature (9)..(9): BNA scaffold modification
  misc_feature (16)..(16): BNA scaffold modification
tguucugacaacagut

SEQ ID NO: 4363 - RNA, 16 nt, Artificial Sequence
  Antisense oligonucleotide
  misc_feature (1)..(2): BNA scaffold modification
  misc_feature (15)..(16): BNA scaffold modification
tguucugacaacagtt

SEQ ID NO: 4364 - RNA, 16 nt, Artificial Sequence
  Antisense oligonucleotide
  misc_feature (1)..(2): BNA scaffold modification
  misc_feature (7)..(7): BNA scaffold modification
  misc_feature (15)..(16): BNA scaffold modification
tguucugacaacagtt

SEQ ID NO: 4365 - RNA, 16 nt, Artificial Sequence
  Antisense oligonucleotide
  misc_feature (1)..(2): BNA scaffold modification
  misc_feature (5)..(5): BNA scaffold modification
  misc_feature (12)..(12): BNA scaffold modification
  misc_feature (15)..(16): BNA scaffold modification
tguucugacaacagtt

SEQ ID NO: 4366 - RNA, 16 nt, Artificial Sequence
  Antisense oligonucleotide
  misc_feature (1)..(1): BNA scaffold modification
  misc_feature (16)..(16): BNA scaffold modification
guucugacaacaguut

SEQ ID NO: 4367 - RNA, 16 nt, Artificial Sequence
  Antisense oligonucleotide
  misc_feature (1)..(1): BNA scaffold modification
  misc_feature (6)..(6): BNA scaffold modification
  misc_feature (16)..(16): BNA scaffold modification
guucugacaacaguut

SEQ ID NO: 4368 - RNA, 16 nt, Artificial Sequence
  Antisense oligonucleotide
  misc_feature (1)..(1): BNA scaffold modification
  misc_feature (13)..(13): BNA scaffold modification
  misc_feature (16)..(16): BNA scaffold modification
guucugacaacaguut

SEQ ID NO: 4369 - RNA, 16 nt, Artificial Sequence
  Antisense oligonucleotide
  misc_feature (1)..(1): BNA scaffold modification
  misc_feature (6)..(6): BNA scaffold modification
  misc_feature (13)..(13): BNA scaffold modification
  misc_feature (16)..(16): BNA scaffold modification
guucugacaacaguut

SEQ ID NO: 4370 - RNA, 16 nt, Artificial Sequence
  Antisense oligonucleotide
  misc_feature (1)..(1): BNA scaffold modification
  misc_feature (4)..(4): BNA scaffold modification
  misc_feature (16)..(16): BNA scaffold modification
guucugacaacaguut

SEQ ID NO: 4371 - RNA, 16 nt, Artificial Sequence
  Antisense oligonucleotide
  misc_feature (1)..(1): BNA scaffold modification
  misc_feature (8)..(8): BNA scaffold modification
  misc_feature (16)..(16): BNA scaffold modification
guucugacaacaguut

SEQ ID NO: 4372 - RNA, 16 nt, Artificial Sequence
  Antisense oligonucleotide
  misc_feature (1)..(1): BNA scaffold modification
  misc_feature (11)..(11): BNA scaffold modification
  misc_feature (16)..(16): BNA scaffold modification
guucugacaacaguut

SEQ ID NO: 4373 - RNA, 16 nt, Artificial Sequence
  Antisense oligonucleotide
  misc_feature (1)..(1): BNA scaffold modification
  misc_feature (11)..(11): BNA scaffold modification
  misc_feature (16)..(16): BNA scaffold modification
guucugacaacaguut

SEQ ID NO: 4374 - RNA, 16 nt, Artificial Sequence
  Antisense oligonucleotide
  misc_feature (1)..(2): BNA scaffold modification
  misc_feature (15)..(16): BNA scaffold modification
gtucugacaacagutt

SEQ ID NO: 4375 - RNA, 16 nt, Artificial Sequence
  Antisense oligonucleotide
  misc_feature (1)..(2): BNA scaffold modification
  misc_feature (8)..(8): BNA scaffold modification
  misc_feature (15)..(16): BNA scaffold modification
gtucugacaacagutt

SEQ ID NO: 4376 - RNA, 16 nt, Artificial Sequence
  Antisense oligonucleotide
  misc_feature (1)..(2): BNA scaffold modification
  misc_feature (6)..(6): BNA scaffold modification
  misc_feature (13)..(13): BNA scaffold modification
  misc_feature (15)..(16): BNA scaffold modification
gtucugacaacagutt

SEQ ID NO: 4377 - RNA, 16 nt, Artificial Sequence
  Antisense oligonucleotide
  misc_feature (1)..(1): BNA scaffold modification
  misc_feature (16)..(16): BNA scaffold modification
tucugacaacaguuug

SEQ ID NO: 4378 - RNA, 16 nt, Artificial Sequence
  Antisense oligonucleotide
  misc_feature (1)..(1): BNA scaffold modification
  misc_feature (5)..(5): BNA scaffold modification
  misc_feature (16)..(16): BNA scaffold modification
tucugacaacaguuug

SEQ ID NO: 4379 - RNA, 16 nt, Artificial Sequence
  Antisense oligonucleotide
  misc_feature (1)..(1): BNA scaffold modification
  misc_feature (12)..(12): BNA scaffold modification
  misc_feature (16)..(16): BNA scaffold modification
tucugacaacaguuug

SEQ ID NO: 4380 - RNA, 16 nt, Artificial Sequence
  Antisense oligonucleotide
  misc_feature (1)..(1): BNA scaffold modification
  misc_feature (5)..(5): BNA scaffold modification
  misc_feature (12)..(12): BNA scaffold modification
  misc_feature (16)..(16): BNA scaffold modification
tucugacaacaguuug

SEQ ID NO: 4381 - RNA, 16 nt, Artificial Sequence
  Antisense oligonucleotide
  misc_feature (1)..(1): BNA scaffold modification
  misc_feature (10)..(10): BNA scaffold modification
  misc_feature (16)..(16): BNA scaffold modification
tucugacaacaguuug

SEQ ID NO: 4382 - RNA, 16 nt, Artificial Sequence
  Antisense oligonucleotide
  misc_feature (1)..(1): BNA scaffold modification
  misc_feature (7)..(7): BNA scaffold modification
  misc_feature (16)..(16): BNA scaffold modification
tucugacaacaguuug

SEQ ID NO: 4383 - RNA, 16 nt, Artificial Sequence
  Antisense oligonucleotide
  misc_feature (1)..(1): BNA scaffold modification
  misc_feature (3)..(3): BNA scaffold modification
  misc_feature (16)..(16): BNA scaffold modification
tucugacaacaguuug

SEQ ID NO: 4384 - RNA, 16 nt, Artificial Sequence
  Antisense oligonucleotide
  misc_feature (1)..(1): BNA scaffold modification
  misc_feature (3)..(3): BNA scaffold modification
  misc_feature (10)..(10): BNA scaffold modification
  misc_feature (16)..(16): BNA scaffold modification
tucugacaacaguuug

SEQ ID NO: 4385 - RNA, 16 nt, Artificial Sequence
  Antisense oligonucleotide
  misc_feature (1)..(2): BNA scaffold modification
  misc_feature (15)..(16): BNA scaffold modification
ttcugacaacaguutg

SEQ ID NO: 4386 - RNA, 16 nt, Artificial Sequence
  Antisense oligonucleotide
  misc_feature (1)..(2): BNA scaffold modification
  misc_feature (7)..(7): BNA scaffold modification
  misc_feature (15)..(16): BNA scaffold modification
ttcugacaacaguutg

SEQ ID NO: 4387 - RNA, 16 nt, Artificial Sequence
  Antisense oligonucleotide
  misc_feature (1)..(2): BNA scaffold modification
  misc_feature (5)..(5): BNA scaffold modification
  misc_feature (12)..(12): BNA scaffold modification
  misc_feature (15)..(16): BNA scaffold modification
ttcugacaacaguutg

SEQ ID NO: 4388 - RNA, 16 nt, Artificial Sequence
  Antisense oligonucleotide
  misc_feature (1)..(1): BNA scaffold modification
  misc_feature (16)..(16): BNA scaffold modification
tcugacaacaguuugc

SEQ ID NO: 4389 - RNA, 16 nt, Artificial Sequence
  Antisense oligonucleotide
  misc_feature (1)..(1): BNA scaffold modification
  misc_feature (4)..(4): BNA scaffold modification
  misc_feature (16)..(16): BNA scaffold modification
tcugacaacaguuugc

SEQ ID NO: 4390 - RNA, 16 nt, Artificial Sequence
  Antisense oligonucleotide
  misc_feature (1)..(1): BNA scaffold modification
  misc_feature (11)..(11): BNA scaffold modification
  misc_feature (16)..(16): BNA scaffold modification
tcugacaacaguuugc

SEQ ID NO: 4391 - RNA, 16 nt, Artificial Sequence
  Antisense oligonucleotide
  misc_feature (1)..(1): BNA scaffold modification
  misc_feature (4)..(4): BNA scaffold modification
  misc_feature (11)..(11): BNA scaffold modification
  misc_feature (16)..(16): BNA scaffold modification
tcugacaacaguuugc

SEQ ID NO: 4392 - RNA, 16 nt, Artificial Sequence
  Antisense oligonucleotide
  misc_feature (1)..(1): BNA scaffold modification
  misc_feature (9)..(9): BNA scaffold modification
  misc_feature (16)..(16): BNA scaffold modification
tcugacaacaguuugc

SEQ ID NO: 4393 - RNA, 16 nt, Artificial Sequence
  Antisense oligonucleotide
  misc_feature (1)..(1): BNA scaffold modification
  misc_feature (6)..(6): BNA scaffold modification
  misc_feature (16)..(16): BNA scaffold modification
tcugacaacaguuugc

SEQ ID NO: 4394 - RNA, 16 nt, Artificial Sequence
  Antisense oligonucleotide
  misc_feature (1)..(1): BNA scaffold modification
  misc_feature (6)..(6): BNA scaffold modification
  misc_feature (9)..(9): BNA scaffold modification
  misc_feature (16)..(16): BNA scaffold modification
tcugacaacaguuugc

SEQ ID NO: 4395 - RNA, 16 nt, Artificial Sequence
  Antisense oligonucleotide
  misc_feature (1)..(1): BNA scaffold modification
  misc_feature (11)..(11): BNA scaffold modification
  misc_feature (15)..(16): BNA scaffold modification
tcugacaacaguuugc

SEQ ID NO: 4396 - RNA, 16 nt, Artificial Sequence
  Antisense oligonucleotide
  misc_feature (1)..(1): BNA scaffold modification
  misc_feature (4)..(4): BNA scaffold modification
  misc_feature (11)..(11): BNA scaffold modification
  misc_feature (15)..(16): BNA scaffold modification
tcugacaacaguuugc

SEQ ID NO: 4397 - RNA, 16 nt, Artificial Sequence
  Antisense oligonucleotide
  misc_feature (1)..(2): BNA scaffold modification
  misc_feature (4)..(4): BNA scaffold modification
  misc_feature (11)..(11): BNA scaffold modification
  misc_feature (15)..(16): BNA scaffold modification
tcugacaacaguuugc

SEQ ID NO: 4398 - RNA, 16 nt, Artificial Sequence
  Antisense oligonucleotide
  misc_feature (1)..(2): BNA scaffold modification
  misc_feature (15)..(16): BNA scaffold modification
tcugacaacaguuugc

SEQ ID NO: 4399 - RNA, 16 nt, Artificial Sequence
  Antisense oligonucleotide
  misc_feature (1)..(2): BNA scaffold modification
  misc_feature (9)..(9): BNA scaffold modification
  misc_feature (15)..(16): BNA scaffold modification
tcugacaacaguuugc

SEQ ID NO: 4400 - RNA, 16 nt, Artificial Sequence
  Antisense oligonucleotide
  misc_feature (1)..(2): BNA scaffold modification
  misc_feature (6)..(6): BNA scaffold modification
  misc_feature (11)..(11): BNA scaffold modification
  misc_feature (15)..(16): BNA scaffold modification
tcugacaacaguuugc

SEQ ID NO: 4401 - RNA, 21 nt, Artificial Sequence
  Antisense oligonucleotide
  misc_feature (1)..(1): BNA scaffold modification
  misc_feature (21)..(21): BNA scaffold modification
cugcccaaugccauccuggag

SEQ ID NO: 4402 - RNA, 21 nt, Artificial Sequence
  Antisense oligonucleotide
  misc_feature (1)..(1): BNA scaffold modification
  misc_feature (3)..(3): BNA scaffold modification
  misc_feature (21)..(21): BNA scaffold modification
cugcccaaugccauccuggag

SEQ ID NO: 4403 - RNA, 21 nt, Artificial Sequence
  Antisense oligonucleotide
  misc_feature (1)..(1): BNA scaffold modification
  misc_feature (10)..(10): BNA scaffold modification
  misc_feature (21)..(21): BNA scaffold modification
cugcccaaugccauccuggag

SEQ ID NO: 4404 - RNA, 21 nt, Artificial Sequence
  Antisense oligonucleotide
  misc_feature (1)..(1): BNA scaffold modification
  misc_feature (18)..(18): BNA scaffold modification
  misc_feature (21)..(21): BNA scaffold modification
cugcccaaugccauccuggag

SEQ ID NO: 4405 - RNA, 21 nt, Artificial Sequence
  Antisense oligonucleotide
  misc_feature (1)..(1): BNA scaffold modification
  misc_feature (19)..(19): BNA scaffold modification
  misc_feature (21)..(21): BNA scaffold modification
cugcccaaugccauccuggag

SEQ ID NO: 4406 - RNA, 21 nt, Artificial Sequence
  Antisense oligonucleotide
  misc_feature (1)..(1): BNA scaffold modification
  misc_feature (3)..(3): BNA scaffold modification
  misc_feature (19)..(19): BNA scaffold modification
  misc_feature (21)..(21): BNA scaffold modification
cugcccaaugccauccuggag

SEQ ID NO: 4407 - RNA, 21 nt, Artificial Sequence
  Antisense oligonucleotide
  misc_feature (1)..(1): BNA scaffold modification
  misc_feature (10)..(10): BNA scaffold modification
  misc_feature (18)..(18): BNA scaffold modification
  misc_feature (21)..(21): BNA scaffold modification
cugcccaaugccauccuggag

SEQ ID NO: 4408 - RNA, 21 nt, Artificial Sequence
  Antisense oligonucleotide
  misc_feature (1)..(1): BNA scaffold modification
  misc_feature (3)..(3): BNA scaffold modification
  misc_feature (10)..(10): BNA scaffold modification
  misc_feature (21)..(21): BNA scaffold modification
cugcccaaugccauccuggag

SEQ ID NO: 4409 - RNA, 21 nt, Artificial Sequence
  Antisense oligonucleotide
  misc_feature (1)..(1): BNA scaffold modification
  misc_feature (16)..(16): BNA scaffold modification
  misc_feature (21)..(21): BNA scaffold modification
cugcccaaugccauccuggag

SEQ ID NO: 4410 - RNA, 21 nt, Artificial Sequence
  Antisense oligonucleotide
  misc_feature (1)..(1): BNA scaffold modification
  misc_feature (12)..(12): BNA scaffold modification
  misc_feature (21)..(21): BNA scaffold modification
cugcccaaugccauccuggag

SEQ ID NO: 4411 - RNA, 21 nt, Artificial Sequence
  Antisense oligonucleotide
  misc_feature (1)..(1): BNA scaffold modification
  misc_feature (6)..(6): BNA scaffold modification
  misc_feature (21)..(21): BNA scaffold modification
cugcccaaugccauccuggag

SEQ ID NO: 4412 - RNA, 21 nt, Artificial Sequence
  Antisense oligonucleotide
  misc_feature (1)..(1): BNA scaffold modification
  misc_feature (6)..(6): BNA scaffold modification
  misc_feature (12)..(12): BNA scaffold modification
  misc_feature (21)..(21): BNA scaffold modification
cugcccaaugccauccuggag

SEQ ID NO: 4413 - RNA, 21 nt, Artificial Sequence
  Antisense oligonucleotide
  misc_feature (1)..(1): BNA scaffold modification
  misc_feature (12)..(12): BNA scaffold modification
  misc_feature (16)..(16): BNA scaffold modification
  misc_feature (21)..(21): BNA scaffold modification
cugcccaaugccauccuggag

SEQ ID NO: 4414 - RNA, 21 nt, Artificial Sequence
  Antisense oligonucleotide
  misc_feature (1)..(1): BNA scaffold modification
  misc_feature (6)..(6): BNA scaffold modification
  misc_feature (12)..(12): BNA scaffold modification
  misc_feature (16)..(16): BNA scaffold modification
  misc_feature (21)..(21): BNA scaffold modification
cugcccaaugccauccuggag

SEQ ID NO: 4415 - RNA, 21 nt, Artificial Sequence
  Antisense oligonucleotide
  misc_feature (1)..(2): BNA scaffold modification
  misc_feature (20)..(21): BNA scaffold modification
ctgcccaaugccauccuggag

SEQ ID NO: 4416 - RNA, 21 nt, Artificial Sequence
  Antisense oligonucleotide
  misc_feature (1)..(2): BNA scaffold modification
  misc_feature (10)..(10): BNA scaffold modification
  misc_feature (20)..(21): BNA scaffold modification
ctgcccaaugccauccuggag

SEQ ID NO: 4417 - RNA, 21 nt, Artificial Sequence
  Antisense oligonucleotide
  misc_feature (1)..(2): BNA scaffold modification
  misc_feature (6)..(6): BNA scaffold modification
  misc_feature (16)..(16): BNA scaffold modification
  misc_feature (20)..(21): BNA scaffold modification
ctgcccaaugccauccuggag

SEQ ID NO: 4418 - RNA, 18 nt, Artificial Sequence
  Antisense oligonucleotide
  misc_feature (1)..(1): BNA scaffold modification
  misc_feature (18)..(18): BNA scaffold modification
cugcccaaugccauccug

SEQ ID NO: 4419 - RNA, 18 nt, Artificial Sequence
  Antisense oligonucleotide
  misc_feature (1)..(1): BNA scaffold modification
  misc_feature (3)..(3): BNA scaffold modification
  misc_feature (18)..(18): BNA scaffold modification
cugcccaaugccauccug

SEQ ID NO: 4420 - RNA, 18 nt, Artificial Sequence
  Antisense oligonucleotide
  misc_feature (1)..(1): BNA scaffold modification
  misc_feature (10)..(10): BNA scaffold modification
  misc_feature (18)..(18): BNA scaffold modification
cugcccaaugccauccug

SEQ ID NO: 4421 - RNA, 18 nt, Artificial Sequence
  Antisense oligonucleotide
  misc_feature (1)..(1): BNA scaffold modification
  misc_feature (3)..(3): BNA scaffold modification
  misc_feature (10)..(10): BNA scaffold modification
  misc_feature (18)..(18): BNA scaffold modification
cugcccaaugccauccug

SEQ ID NO: 4422 - RNA, 18 nt, Artificial Sequence
  Antisense oligonucleotide
  misc_feature (1)..(1): BNA scaffold modification
  misc_feature (16)..(16): BNA scaffold modification
  misc_feature (18)..(18): BNA scaffold modification
cugcccaaugccauccug

SEQ ID NO: 4423 - RNA, 18 nt, Artificial Sequence
  Antisense oligonucleotide
  misc_feature (1)..(1): BNA scaffold modification
  misc_feature (12)..(12): BNA scaffold modification
  misc_feature (18)..(18): BNA scaffold modification
cugcccaaugccauccug

SEQ ID NO: 4424 - RNA, 18 nt, Artificial Sequence
  Antisense oligonucleotide
  misc_feature (1)..(1): BNA scaffold modification
  misc_feature (6)..(6): BNA scaffold modification
  misc_feature (18)..(18): BNA scaffold modification
cugcccaaugccauccug

SEQ ID NO: 4425 - RNA, 18 nt, Artificial Sequence
  Antisense oligonucleotide
  misc_feature (1)..(1): BNA scaffold modification
  misc_feature (6)..(6): BNA scaffold modification
  misc_feature (12)..(12): BNA scaffold modification
  misc_feature (18)..(18): BNA scaffold modification
cugcccaaugccauccug

SEQ ID NO: 4426 - RNA, 18 nt, Artificial Sequence
  Antisense oligonucleotide
  misc_feature (1)..(2): BNA scaffold modification
  misc_feature (17)..(18): BNA scaffold modification
ctgcccaaugccaucctg

SEQ ID NO: 4427 - RNA, 18 nt, Artificial Sequence
  Antisense oligonucleotide
  misc_feature (1)..(2): BNA scaffold modification
  misc_feature (10)..(10): BNA scaffold modification
  misc_feature (17)..(18): BNA scaffold modification
ctgcccaaugccaucctg

SEQ ID NO: 4428 - RNA, 18 nt, Artificial Sequence
  Antisense oligonucleotide
  misc_feature (1)..(2): BNA scaffold modification
  misc_feature (6)..(6): BNA scaffold modification
  misc_feature (12)..(12): BNA scaffold modification
  misc_feature (17)..(18): BNA scaffold modification
ctgcccaaugccaucctg

SEQ ID NO: 4429 - RNA, 18 nt, Artificial Sequence
  Antisense oligonucleotide
  misc_feature (1)..(1): BNA scaffold modification
  misc_feature (18)..(18): BNA scaffold modification
tgcccaaugccauccugg

SEQ ID NO: 4430 - RNA, 18 nt, Artificial Sequence
  Antisense oligonucleotide
  misc_feature (1)..(2): BNA scaffold modification
  misc_feature (18)..(18): BNA scaffold modification
tgcccaaugccauccugg

SEQ ID NO: 4431 - RNA, 18 nt, Artificial Sequence
  Antisense oligonucleotide
  misc_feature (1)..(1): BNA scaffold modification
  misc_feature (9)..(9): BNA scaffold modification
  misc_feature (18)..(18): BNA scaffold modification
tgcccaaugccauccugg

SEQ ID NO: 4432 - RNA, 18 nt, Artificial Sequence
  Antisense oligonucleotide
  misc_feature (1)..(1): BNA scaffold modification
  misc_feature (17)..(18): BNA scaffold modification
tgcccaaugccauccugg

SEQ ID NO: 4433 - RNA, 18 nt, Artificial Sequence
  Antisense oligonucleotide
  misc_feature (1)..(2): BNA scaffold modification
  misc_feature (9)..(9): BNA scaffold modification
  misc_feature (17)..(18): BNA scaffold modification
tgcccaaugccauccugg

SEQ ID NO: 4434 - RNA, 18 nt, Artificial Sequence
  Antisense oligonucleotide
  misc_feature (1)..(1): BNA scaffold modification
  misc_feature (15)..(15): BNA scaffold modification
  misc_feature (18)..(18): BNA scaffold modification
tgcccaaugccauccugg

SEQ ID NO: 4435 - RNA, 18 nt, Artificial Sequence
  Antisense oligonucleotide
  misc_feature (1)..(1): BNA scaffold modification
  misc_feature (11)..(11): BNA scaffold modification
  misc_feature (18)..(18): BNA scaffold modification
tgcccaaugccauccugg

SEQ ID NO: 4436 - RNA, 18 nt, Artificial Sequence
  Antisense oligonucleotide
  misc_feature (1)..(1): BNA scaffold modification
  misc_feature (5)..(5): BNA scaffold modification
  misc_feature (18)..(18): BNA scaffold modification
tgcccaaugccauccugg

SEQ ID NO: 4437 - RNA, 18 nt, Artificial Sequence
  Antisense oligonucleotide
  misc_feature (1)..(1): BNA scaffold modification
  misc_feature (5)..(5): BNA scaffold modification
  misc_feature (11)..(11): BNA scaffold modification
  misc_feature (18)..(18): BNA scaffold modification
tgcccaaugccauccugg

SEQ ID NO: 4438 - RNA, 18 nt, Artificial Sequence
  Antisense oligonucleotide
  misc_feature (1)..(1): BNA scaffold modification
  misc_feature (11)..(11): BNA scaffold modification
  misc_feature (15)..(15): BNA scaffold modification
  misc_feature (18)..(18): BNA scaffold modification
tgcccaaugccauccugg

SEQ ID NO: 4439 - RNA, 18 nt, Artificial Sequence
  Antisense oligonucleotide
  misc_feature (1)..(2): BNA scaffold modification
  misc_feature (5)..(5): BNA scaffold modification
  misc_feature (14)..(14): BNA scaffold modification
  misc_feature (17)..(18): BNA scaffold modification
tgcccaaugccauccugg

SEQ ID NO: 4440 - RNA, 18 nt, Artificial Sequence
  Antisense oligonucleotide
  misc_feature (1)..(1): BNA scaffold modification
  misc_feature (18)..(18): BNA scaffold modification
gcccaaugccauccugga

SEQ ID NO: 4441 - RNA, 18 nt, Artificial Sequence
  Antisense oligonucleotide
  misc_feature (1)..(1): BNA scaffold modification
  misc_feature (8)..(8): BNA scaffold modification
  misc_feature (18)..(18): BNA scaffold modification
gcccaaugccauccugga

SEQ ID NO: 4442 - RNA, 18 nt, Artificial Sequence
  Antisense oligonucleotide
  misc_feature (1)..(1): BNA scaffold modification
  misc_feature (16)..(16): BNA scaffold modification
  misc_feature (18)..(18): BNA scaffold modification
gcccaaugccauccugga

SEQ ID NO: 4443 - RNA, 18 nt, Artificial Sequence
  Antisense oligonucleotide
  misc_feature (1)..(1): BNA scaffold modification
  misc_feature (8)..(8): BNA scaffold modification
  misc_feature (16)..(16): BNA scaffold modification
  misc_feature (18)..(18): BNA scaffold modification
gcccaaugccauccugga

SEQ ID NO: 4444 - RNA, 18 nt, Artificial Sequence
  Antisense oligonucleotide
  misc_feature (1)..(1): BNA scaffold modification
  misc_feature (14)..(14): BNA scaffold modification
  misc_feature (18)..(18): BNA scaffold modification
gcccaaugccauccugga

SEQ ID NO: 4445 - RNA, 18 nt, Artificial Sequence
  Antisense oligonucleotide
  misc_feature (1)..(1): BNA scaffold modification
  misc_feature (10)..(10): BNA scaffold modification
  misc_feature (18)..(18): BNA scaffold modification
gcccaaugccauccugga

SEQ ID NO: 4446 - RNA, 18 nt, Artificial Sequence
  Antisense oligonucleotide
  misc_feature (1)..(1): BNA scaffold modification
  misc_feature (4)..(4): BNA scaffold modification
  misc_feature (18)..(18): BNA scaffold modification
gcccaaugccauccugga

SEQ ID NO: 4447 - RNA, 18 nt, Artificial Sequence
  Antisense oligonucleotide
  misc_feature (1)..(1): BNA scaffold modification
  misc_feature (4)..(4): BNA scaffold modification
  misc_feature (10)..(10): BNA scaffold modification
  misc_feature (18)..(18): BNA scaffold modification
gcccaaugccauccugga

SEQ ID NO: 4448 - RNA, 18 nt, Artificial Sequence
  Antisense oligonucleotide
  misc_feature (1)..(1): BNA scaffold modification
  misc_feature (10)..(10): BNA scaffold modification
  misc_feature (18)..(18): BNA scaffold modification
gcccaaugccauccugga

SEQ ID NO: 4449 - RNA, 18 nt, Artificial Sequence
  Antisense oligonucleotide
  misc_feature (1)..(1): BNA scaffold modification
  misc_feature (9)..(9): BNA scaffold modification
  misc_feature (14)..(14): BNA scaffold modification
  misc_feature (18)..(18): BNA scaffold modification
gcccaaugccauccugga

SEQ ID NO: 4450 - RNA, 18 nt, Artificial Sequence
  Antisense oligonucleotide
  misc_feature (1)..(2): BNA scaffold modification
  misc_feature (17)..(18): BNA scaffold modification
gcccaaugccauccugga

SEQ ID NO: 4451 - RNA, 18 nt, Artificial Sequence
  Antisense oligonucleotide
  misc_feature (1)..(2): BNA scaffold modification
  misc_feature (8)..(8): BNA scaffold modification
  misc_feature (17)..(18): BNA scaffold modification
gcccaaugccauccugga

SEQ ID NO: 4452 - RNA, 18 nt, Artificial Sequence
  Antisense oligonucleotide
  misc_feature (1)..(2): BNA scaffold modification
  misc_feature (4)..(4): BNA scaffold modification
  misc_feature (13)..(13): BNA scaffold modification
  misc_feature (17)..(18): BNA scaffold modification
gcccaaugccauccugga

SEQ ID NO: 4453 - RNA, 18 nt, Artificial Sequence
  Antisense oligonucleotide
  misc_feature (1)..(1): BNA scaffold modification
  misc_feature (18)..(18): BNA scaffold modification
cccaaugccauccuggag

SEQ ID NO: 4454 - RNA, 18 nt, Artificial Sequence
  Antisense oligonucleotide
  misc_feature (1)..(1): BNA scaffold modification
  misc_feature (7)..(7): BNA scaffold modification
  misc_feature (18)..(18): BNA scaffold modification
cccaaugccauccuggag

SEQ ID NO: 4455 - RNA, 18 nt, Artificial Sequence
  Antisense oligonucleotide
  misc_feature (1)..(1): BNA scaffold modification
  misc_feature (15)..(15): BNA scaffold modification
  misc_feature (18)..(18): BNA scaffold modification
cccaaugccauccuggag

SEQ ID NO: 4456 - RNA, 18 nt, Artificial Sequence
  Antisense oligonucleotide
  misc_feature (1)..(1): BNA scaffold modification
  misc_feature (7)..(7): BNA scaffold modification
  misc_feature (15)..(15): BNA scaffold modification
  misc_feature (18)..(18): BNA scaffold modification
cccaaugccauccuggag

SEQ ID NO: 4457 - RNA, 18 nt, Artificial Sequence
  Antisense oligonucleotide
  misc_feature (1)..(1): BNA scaffold modification
  misc_feature (9)..(9): BNA scaffold modification
  misc_feature (13)..(13): BNA scaffold modification
  misc_feature (18)..(18): BNA scaffold modification
cccaaugccauccuggag

SEQ ID NO: 4458 - RNA, 18 nt, Artificial Sequence
  Antisense oligonucleotide
  misc_feature (1)..(1): BNA scaffold modification
  misc_feature (9)..(9): BNA scaffold modification
  misc_feature (18)..(18): BNA scaffold modification
cccaaugccauccuggag

SEQ ID NO: 4459 - RNA, 18 nt, Artificial Sequence
  Antisense oligonucleotide
  misc_feature (1)..(1): BNA scaffold modification
  misc_feature (3)..(3): BNA scaffold modification
  misc_feature (12)..(12): BNA scaffold modification
  misc_feature (18)..(18): BNA scaffold modification
cccaaugccauccuggag

SEQ ID NO: 4460 - RNA, 18 nt, Artificial Sequence
  Antisense oligonucleotide
  misc_feature (1)..(1): BNA scaffold modification
  misc_feature (7)..(7): BNA scaffold modification
  misc_feature (12)..(12): BNA scaffold modification
  misc_feature (18)..(18): BNA scaffold modification
cccaaugccauccuggag

SEQ ID NO: 4461 - RNA, 18 nt, Artificial Sequence
  Antisense oligonucleotide
  misc_feature (1)..(2): BNA scaffold modification
  misc_feature (17)..(18): BNA scaffold modification
cccaaugccauccuggag

SEQ ID NO: 4462 - RNA, 18 nt, Artificial Sequence
  Antisense oligonucleotide
  misc_feature (1)..(2): BNA scaffold modification
  misc_feature (9)..(9): BNA scaffold modification
  misc_feature (17)..(18): BNA scaffold modification
cccaaugccauccuggag

SEQ ID NO: 4463 - RNA, 18 nt, Artificial Sequence
  Antisense oligonucleotide
  misc_feature (1)..(2): BNA scaffold modification
  misc_feature (7)..(7): BNA scaffold modification
  misc_feature (13)..(13): BNA scaffold modification
  misc_feature (17)..(18): BNA scaffold modification
cccaaugccauccuggag

SEQ ID NO: 4464 - RNA, 16 nt, Artificial Sequence
  Antisense oligonucleotide
  misc_feature (1)..(1): BNA scaffold modification
  misc_feature (16)..(16): BNA scaffold modification
cugcccaaugccaucc

SEQ ID NO: 4465 - RNA, 16 nt, Artificial Sequence
  Antisense oligonucleotide
  misc_feature (1)..(1): BNA scaffold modification
  misc_feature (3)..(3): BNA scaffold modification
  misc_feature (16)..(16): BNA scaffold modification
cugcccaaugccaucc

SEQ ID NO: 4466 - RNA, 16 nt, Artificial Sequence
  Antisense oligonucleotide
  misc_feature (1)..(1): BNA scaffold modification
  misc_feature (10)..(10): BNA scaffold modification
  misc_feature (16)..(16): BNA scaffold modification
cugcccaaugccaucc

SEQ ID NO: 4467 - RNA, 16 nt, Artificial Sequence
  Antisense oligonucleotide
  misc_feature (1)..(1): BNA scaffold modification
  misc_feature (3)..(3): BNA scaffold modification
  misc_feature (10)..(10): BNA scaffold modification
  misc_feature (16)..(16): BNA scaffold modification
cugcccaaugccaucc

SEQ ID NO: 4468 - RNA, 16 nt, Artificial Sequence
  Antisense oligonucleotide
  misc_feature (1)..(1): BNA scaffold modification
  misc_feature (6)..(6): BNA scaffold modification
  misc_feature (16)..(16): BNA scaffold modification
cugcccaaugccaucc

SEQ ID NO: 4469 - RNA, 16 nt, Artificial Sequence
  Antisense oligonucleotide
  misc_feature (1)..(1): BNA scaffold modification
  misc_feature (12)..(12): BNA scaffold modification
  misc_feature (16)..(16): BNA scaffold modification
cugcccaaugccaucc

SEQ ID NO: 4470 - RNA, 16 nt, Artificial Sequence
  Antisense oligonucleotide
  misc_feature (1)..(1): BNA scaffold modification
  misc_feature (6)..(6): BNA scaffold modification
  misc_feature (12)..(12): BNA scaffold modification
  misc_feature (16)..(16): BNA scaffold modification
cugcccaaugccaucc

SEQ ID NO: 4471 - RNA, 16 nt, Artificial Sequence
  Antisense oligonucleotide
  misc_feature (1)..(1): BNA scaffold modification
  misc_feature (10)..(10): BNA scaffold modification
  misc_feature (15)..(16): BNA scaffold modification
cugcccaaugccaucc

SEQ ID NO: 4472 - RNA, 16 nt, Artificial Sequence
  Antisense oligonucleotide
  misc_feature (1)..(2): BNA scaffold modification
  misc_feature (15)..(16): BNA scaffold modification
ctgcccaaugccaucc

SEQ ID NO: 4473 - RNA, 16 nt, Artificial Sequence
  Antisense oligonucleotide
  misc_feature (1)..(2): BNA scaffold modification
  misc_feature (6)..(6): BNA scaffold modification
  misc_feature (10)..(10): BNA scaffold modification
  misc_feature (15)..(16): BNA scaffold modification
ctgcccaaugccaucc

SEQ ID NO: 4474 - RNA, 16 nt, Artificial Sequence
  Antisense oligonucleotide
  misc_feature (1)..(2): BNA scaffold modification
  misc_feature (14)..(16): BNA scaffold modification
ctgcccaaugccatcc

SEQ ID NO: 4475 - RNA, 16 nt, Artificial Sequence
  Antisense oligonucleotide
  misc_feature (1)..(1): BNA scaffold modification
  misc_feature (16)..(16): BNA scaffold modification
tgcccaaugccaucct

SEQ ID NO: 4476 - RNA, 16 nt, Artificial Sequence
  Antisense oligonucleotide
  misc_feature (1)..(2): BNA scaffold modification
  misc_feature (16)..(16): BNA scaffold modification
tgcccaaugccaucct

SEQ ID NO: 4477 - RNA, 16 nt, Artificial Sequence
  Antisense oligonucleotide
  misc_feature (1)..(1): BNA scaffold modification
  misc_feature (9)..(9): BNA scaffold modification
  misc_feature (16)..(16): BNA scaffold modification
tgcccaaugccaucct

SEQ ID NO: 4478 - RNA, 16 nt, Artificial Sequence
  Antisense oligonucleotide
  misc_feature (1)..(2): BNA scaffold modification
  misc_feature (9)..(9): BNA scaffold modification
  misc_feature (16)..(16): BNA scaffold modification
tgcccaaugccaucct

SEQ ID NO: 4479 - RNA, 16 nt, Artificial Sequence
  Antisense oligonucleotide
  misc_feature (1)..(1): BNA scaffold modification
  misc_feature (5)..(5): BNA scaffold modification
  misc_feature (16)..(16): BNA scaffold modification
tgcccaaugccaucct

SEQ ID NO: 4480 - RNA, 16 nt, Artificial Sequence
  Antisense oligonucleotide
  misc_feature (1)..(1): BNA scaffold modification
  misc_feature (11)..(11): BNA scaffold modification
  misc_feature (16)..(16): BNA scaffold modification
tgcccaaugccaucct

SEQ ID NO: 4481 - RNA, 16 nt, Artificial Sequence
  Antisense oligonucleotide
  misc_feature (1)..(1): BNA scaffold modification
  misc_feature (5)..(5): BNA scaffold modification
  misc_feature (11)..(11): BNA scaffold modification
  misc_feature (16)..(16): BNA scaffold modification
tgcccaaugccaucct

SEQ ID NO: 4482 - RNA, 16 nt, Artificial Sequence
  Antisense oligonucleotide
  misc_feature (1)..(1): BNA scaffold modification
  misc_feature (9)..(9): BNA scaffold modification
  misc_feature (15)..(16): BNA scaffold modification
tgcccaaugccaucct

SEQ ID NO: 4483 - RNA, 16 nt, Artificial Sequence
  Antisense oligonucleotide
  misc_feature (1)..(2): BNA scaffold modification
  misc_feature (15)..(16): BNA scaffold modification
tgcccaaugccaucct

SEQ ID NO: 4484 - RNA, 16 nt, Artificial Sequence
  Antisense oligonucleotide
  misc_feature (1)..(2): BNA scaffold modification
  misc_feature (5)..(5): BNA scaffold modification
  misc_feature (11)..(11): BNA scaffold modification
  misc_feature (15)..(16): BNA scaffold modification
tgcccaaugccaucct

SEQ ID NO: 4485 - RNA, 16 nt, Artificial Sequence
  Antisense oligonucleotide
  misc_feature (1)..(1): BNA scaffold modification
  misc_feature (16)..(16): BNA scaffold modification
gcccaaugccauccug

SEQ ID NO: 4486 - RNA, 16 nt, Artificial Sequence
  Antisense oligonucleotide
  misc_feature (1)..(1): BNA scaffold modification
  misc_feature (8)..(8): BNA scaffold modification
  misc_feature (16)..(16): BNA scaffold modification
gcccaaugccauccug

SEQ ID NO: 4487 - RNA, 16 nt, Artificial Sequence
  Antisense oligonucleotide
  misc_feature (1)..(1): BNA scaffold modification
  misc_feature (14)..(14): BNA scaffold modification
  misc_feature (16)..(16): BNA scaffold modification
gcccaaugccauccug

SEQ ID NO: 4488 - RNA, 16 nt, Artificial Sequence
  Antisense oligonucleotide
  misc_feature (1)..(1): BNA scaffold modification
  misc_feature (10)..(10): BNA scaffold modification
  misc_feature (16)..(16): BNA scaffold modification
gcccaaugccauccug

SEQ ID NO: 4489 - RNA, 16 nt, Artificial Sequence
  Antisense oligonucleotide
  misc_feature (1)..(1): BNA scaffold modification
  misc_feature (4)..(4): BNA scaffold modification
  misc_feature (16)..(16): BNA scaffold modification
gcccaaugccauccug

SEQ ID NO: 4490 - RNA, 16 nt, Artificial Sequence
  Antisense oligonucleotide
  misc_feature (1)..(1): BNA scaffold modification
  misc_feature (4)..(4): BNA scaffold modification
  misc_feature (10)..(10): BNA scaffold modification
  misc_feature (16)..(16): BNA scaffold modification
gcccaaugccauccug

SEQ ID NO: 4491 - RNA, 16 nt, Artificial Sequence
  Antisense oligonucleotide
  misc_feature (1)..(1): BNA scaffold modification
  misc_feature (4)..(4): BNA scaffold modification
  misc_feature (14)..(14): BNA scaffold modification
  misc_feature (16)..(16): BNA scaffold modification
gcccaaugccauccug

SEQ ID NO: 4492 - RNA, 16 nt, Artificial Sequence
  Antisense oligonucleotide
  misc_feature (1)..(1): BNA scaffold modification
  misc_feature (10)..(10): BNA scaffold modification
  misc_feature (14)..(14): BNA scaffold modification
  misc_feature (16)..(16): BNA scaffold modification
gcccaaugccauccug

SEQ ID NO: 4493 - RNA, 16 nt, Artificial Sequence
  Antisense oligonucleotide
  misc_feature (1)..(2): BNA scaffold modification
  misc_feature (15)..(16): BNA scaffold modification
gcccaaugccaucctg

SEQ ID NO: 4494 - RNA, 16 nt, Artificial Sequence
  Antisense oligonucleotide
  misc_feature (1)..(2): BNA scaffold modification
  misc_feature (8)..(8): BNA scaffold modification
  misc_feature (15)..(16): BNA scaffold modification
gcccaaugccaucctg

SEQ ID NO: 4495 - RNA, 16 nt, Artificial Sequence
  Antisense oligonucleotide
  misc_feature (1)..(2): BNA scaffold modification
  misc_feature (8)..(8): BNA scaffold modification
  misc_feature (13)..(13): BNA scaffold modification
  misc_feature (15)..(16): BNA scaffold modification
gcccaaugccaucctg

SEQ ID NO: 4496 - RNA, 16 nt, Artificial Sequence
  Antisense oligonucleotide
  misc_feature (1)..(1): BNA scaffold modification
  misc_feature (16)..(16): BNA scaffold modification
cccaaugccauccugg

SEQ ID NO: 4497 - RNA, 16 nt, Artificial Sequence
  Antisense oligonucleotide
  misc_feature (1)..(1): BNA scaffold modification
  misc_feature (7)..(7): BNA scaffold modification
  misc_feature (16)..(16): BNA scaffold modification
cccaaugccauccugg

SEQ ID NO: 4498 - RNA, 16 nt, Artificial Sequence
  Antisense oligonucleotide
  misc_feature (1)..(1): BNA scaffold modification
  misc_feature (7)..(7): BNA scaffold modification
  misc_feature (15)..(16): BNA scaffold modification
cccaaugccauccugg

SEQ ID NO: 4499 - RNA, 16 nt, Artificial Sequence
  Antisense oligonucleotide
  misc_feature (1)..(1): BNA scaffold modification
  misc_feature (13)..(13): BNA scaffold modification
  misc_feature (16)..(16): BNA scaffold modification
cccaaugccauccugg

SEQ ID NO: 4500 - RNA, 16 nt, Artificial Sequence
  Antisense oligonucleotide
  misc_feature (1)..(1): BNA scaffold modification
  misc_feature (9)..(9): BNA scaffold modification
  misc_feature (16)..(16): BNA scaffold modification
cccaaugccauccugg

SEQ ID NO: 4501 - RNA, 16 nt, Artificial Sequence
  Antisense oligonucleotide
  misc_feature (1)..(1): BNA scaffold modification
  misc_feature (3)..(3): BNA scaffold modification
  misc_feature (9)..(9): BNA scaffold modification
  misc_feature (16)..(16): BNA scaffold modification
cccaaugccauccugg

SEQ ID NO: 4502 - RNA, 16 nt, Artificial Sequence
  Antisense oligonucleotide
  misc_feature (1)..(1): BNA scaffold modification
  misc_feature (3)..(3): BNA scaffold modification
  misc_feature (16)..(16): BNA scaffold modification
cccaaugccauccugg

SEQ ID NO: 4503 - RNA, 16 nt, Artificial Sequence
  Antisense oligonucleotide
  misc_feature (1)..(1): BNA scaffold modification
  misc_feature (9)..(9): BNA scaffold modification
  misc_feature (13)..(13): BNA scaffold modification
  misc_feature (16)..(16): BNA scaffold modification
cccaaugccauccugg

SEQ ID NO: 4504 - RNA, 16 nt, Artificial Sequence
  Antisense oligonucleotide
  misc_feature (1)..(2): BNA scaffold modification
  misc_feature (15)..(16): BNA scaffold modification
cccaaugccauccugg

SEQ ID NO: 4505 - RNA, 16 nt, Artificial Sequence
  Antisense oligonucleotide
  misc_feature (1)..(2): BNA scaffold modification
  misc_feature (7)..(7): BNA scaffold modification
  misc_feature (15)..(16): BNA scaffold modification
cccaaugccauccugg

SEQ ID NO: 4506 - RNA, 16 nt, Artificial Sequence
  Antisense oligonucleotide
  misc_feature (1)..(2): BNA scaffold modification
  misc_feature (9)..(9): BNA scaffold modification
  misc_feature (15)..(16): BNA scaffold modification
cccaaugccauccugg

SEQ ID NO: 4507 - RNA, 16 nt, Artificial Sequence
  Antisense oligonucleotide
  misc_feature (1)..(1): BNA scaffold modification
  misc_feature (16)..(16): BNA scaffold modification
ccaaugccauccugga

SEQ ID NO: 4508 - RNA, 16 nt, Artificial Sequence
  Antisense oligonucleotide
  misc_feature (1)..(1): BNA scaffold modification
  misc_feature (6)..(6): BNA scaffold modification
  misc_feature (16)..(16): BNA scaffold modification
ccaaugccauccugga

SEQ ID NO: 4509 - RNA, 16 nt, Artificial Sequence
  Antisense oligonucleotide
  misc_feature (1)..(1): BNA scaffold modification
  misc_feature (14)..(14): BNA scaffold modification
  misc_feature (16)..(16): BNA scaffold modification
ccaaugccauccugga

SEQ ID NO: 4510 - RNA, 16 nt, Artificial Sequence
  Antisense oligonucleotide
  misc_feature (1)..(1): BNA scaffold modification
  misc_feature (6)..(6): BNA scaffold modification
  misc_feature (14)..(14): BNA scaffold modification
  misc_feature (16)..(16): BNA scaffold modification
ccaaugccauccugga

SEQ ID NO: 4511 - RNA, 16 nt, Artificial Sequence
  Antisense oligonucleotide
  misc_feature (1)..(1): BNA scaffold modification
  misc_feature (12)..(12): BNA scaffold modification
  misc_feature (16)..(16): BNA scaffold modification
ccaaugccauccugga

SEQ ID NO: 4512 - RNA, 16 nt, Artificial Sequence
  Antisense oligonucleotide
  misc_feature (1)..(1): BNA scaffold modification
  misc_feature (8)..(8): BNA scaffold modification
  misc_feature (16)..(16): BNA scaffold modification
ccaaugccauccugga

SEQ ID NO: 4513 - RNA, 16 nt, Artificial Sequence
  Antisense oligonucleotide
  misc_feature (1)..(1): BNA scaffold modification
  misc_feature (8)..(8): BNA scaffold modification
  misc_feature (12)..(12): BNA scaffold modification
  misc_feature (16)..(16): BNA scaffold modification
ccaaugccauccugga

SEQ ID NO: 4514 - RNA, 16 nt, Artificial Sequence
  Antisense oligonucleotide
  misc_feature (1)..(1): BNA scaffold modification
  misc_feature (6)..(6): BNA scaffold modification
  misc_feature (15)..(16): BNA scaffold modification
ccaaugccauccugga

SEQ ID NO: 4515 - RNA, 16 nt, Artificial Sequence
  Antisense oligonucleotide
  misc_feature (1)..(2): BNA scaffold modification
  misc_feature (15)..(16): BNA scaffold modification
ccaaugccauccugga

SEQ ID NO: 4516 - RNA, 16 nt, Artificial Sequence
  Antisense oligonucleotide
  misc_feature (1)..(2): BNA scaffold modification
  misc_feature (6)..(6): BNA scaffold modification
  misc_feature (11)..(11): BNA scaffold modification
  misc_feature (15)..(16): BNA scaffold modification
ccaaugccauccugga

SEQ ID NO: 4517 - RNA, 16 nt, Artificial Sequence
  Antisense oligonucleotide
  misc_feature (1)..(1): BNA scaffold modification
  misc_feature (16)..(16): BNA scaffold modification
caaugccauccuggag

SEQ ID NO: 4518 - RNA, 16 nt, Artificial Sequence
  Antisense oligonucleotide
  misc_feature (1)..(1): BNA scaffold modification
  misc_feature (5)..(5): BNA scaffold modification
  misc_feature (16)..(16): BNA scaffold modification
caaugccauccuggag

SEQ ID NO: 4519 - RNA, 16 nt, Artificial Sequence
  Antisense oligonucleotide
  misc_feature (1)..(1): BNA scaffold modification
  misc_feature (13)..(13): BNA scaffold modification
  misc_feature (16)..(16): BNA scaffold modification
caaugccauccuggag

SEQ ID NO: 4520 - RNA, 16 nt, Artificial Sequence
  Antisense oligonucleotide
  misc_feature (1)..(1): BNA scaffold modification
  misc_feature (5)..(5): BNA scaffold modification
  misc_feature (14)..(14): BNA scaffold modification
  misc_feature (16)..(16): BNA scaffold modification
caaugccauccuggag

SEQ ID NO: 4521 - RNA, 16 nt, Artificial Sequence
  Antisense oligonucleotide
  misc_feature (1)..(1): BNA scaffold modification
  misc_feature (5)..(5): BNA scaffold modification
  misc_feature (13)..(13): BNA scaffold modification
  misc_feature (16)..(16): BNA scaffold modification
caaugccauccuggag

SEQ ID NO: 4522 - RNA, 16 nt, Artificial Sequence
  Antisense oligonucleotide
  misc_feature (1)..(1): BNA scaffold modification
  misc_feature (11)..(11): BNA scaffold modification
  misc_feature (16)..(16): BNA scaffold modification
caaugccauccuggag

SEQ ID NO: 4523 - RNA, 16 nt, Artificial Sequence
  Antisense oligonucleotide
  misc_feature (1)..(1): BNA scaffold modification
  misc_feature (7)..(7): BNA scaffold modification
  misc_feature (16)..(16): BNA scaffold modification
caaugccauccuggag

SEQ ID NO: 4524 - RNA, 16 nt, Artificial Sequence
  Antisense oligonucleotide
  misc_feature (1)..(1): BNA scaffold modification
  misc_feature (7)..(7): BNA scaffold modification
  misc_feature (11)..(11): BNA scaffold modification
  misc_feature (16)..(16): BNA scaffold modification
caaugccauccuggag

SEQ ID NO: 4525 - RNA, 16 nt, Artificial Sequence
  Antisense oligonucleotide
  misc_feature (1)..(2): BNA scaffold modification
  misc_feature (15)..(16): BNA scaffold modification
caaugccauccuggag

SEQ ID NO: 4526 - RNA, 16 nt, Artificial Sequence
  Antisense oligonucleotide
  misc_feature (1)..(2): BNA scaffold modification
  misc_feature (10)..(10): BNA scaffold modification
  misc_feature (15)..(16): BNA scaffold modification
caaugccauccuggag

SEQ ID NO: 4527 - RNA, 16 nt, Artificial Sequence
  Antisense oligonucleotide
  misc_feature (1)..(2): BNA scaffold modification
  misc_feature (5)..(5): BNA scaffold modification
  misc_feature (13)..(13): BNA scaffold modification
  misc_feature (15)..(16): BNA scaffold modification
caaugccauccuggag

SEQ ID NO: 4528 - RNA, 22 nt, Artificial Sequence
  Antisense oligonucleotide
  misc_feature (1)..(2): BNA scaffold modification
  misc_feature (22)..(22): BNA scaffold modification
tcaaggaagauggcauuucuag

SEQ ID NO: 4529 - RNA, 22 nt, Artificial Sequence
  Antisense oligonucleotide
  misc_feature (1)..(2): BNA scaffold modification
  misc_feature (10)..(10): BNA scaffold modification
  misc_feature (22)..(22): BNA scaffold modification
tcaaggaagauggcauuucuag

SEQ ID NO: 4530 - RNA, 22 nt, Artificial Sequence
  Antisense oligonucleotide
  misc_feature (1)..(2): BNA scaffold modification
  misc_feature (10)..(10): BNA scaffold modification
  misc_feature (15)..(15): BNA scaffold modification
  misc_feature (22)..(22): BNA scaffold modification
tcaaggaagauggcauuucuag

SEQ ID NO: 4531 - RNA, 22 nt, Artificial Sequence
  Antisense oligonucleotide
  misc_feature (1)..(2): BNA scaffold modification
  misc_feature (13)..(13): BNA scaffold modification
  misc_feature (22)..(22): BNA scaffold modification
tcaaggaagauggcauuucuag

SEQ ID NO: 4532 - RNA, 22 nt, Artificial Sequence
  Antisense oligonucleotide
  misc_feature (1)..(2): BNA scaffold modification
  misc_feature (9)..(9): BNA scaffold modification
  misc_feature (22)..(22): BNA scaffold modification
tcaaggaagauggcauuucuag

SEQ ID NO: 4533 - RNA, 22 nt, Artificial Sequence
  Antisense oligonucleotide
  misc_feature (1)..(2): BNA scaffold modification
  misc_feature (9)..(9): BNA scaffold modification
  misc_feature (13)..(13): BNA scaffold modification
  misc_feature (22)..(22): BNA scaffold modification
tcaaggaagauggcauuucuag

SEQ ID NO: 4534 - RNA, 22 nt, Artificial Sequence
  Antisense oligonucleotide
  misc_feature (1)..(2): BNA scaffold modification
  misc_feature (5)..(5): BNA scaffold modification
  misc_feature (9)..(9): BNA scaffold modification
  misc_feature (13)..(13): BNA scaffold modification
  misc_feature (22)..(22): BNA scaffold modification
tcaaggaagauggcauuucuag

SEQ ID NO: 4535 - RNA, 20 nt, Artificial Sequence
  Antisense oligonucleotide
  misc_feature (1)..(2): BNA scaffold modification
  misc_feature (20)..(20): BNA scaffold modification
tcaaggaagauggcauuuct

SEQ ID NO: 4536 - RNA, 20 nt, Artificial Sequence
  Antisense oligonucleotide
  misc_feature (1)..(2): BNA scaffold modification
  misc_feature (10)..(10): BNA scaffold modification
  misc_feature (20)..(20): BNA scaffold modification
tcaaggaagauggcauuuct

SEQ ID NO: 4537 - RNA, 20 nt, Artificial Sequence
  Antisense oligonucleotide
  misc_feature (1)..(1): BNA scaffold modification
  misc_feature (7)..(7): BNA scaffold modification
  misc_feature (15)..(15): BNA scaffold modification
  misc_feature (20)..(20): BNA scaffold modification
tcaaggaagauggcauuuct

SEQ ID NO: 4538 - RNA, 20 nt, Artificial Sequence
  Antisense oligonucleotide
  misc_feature (1)..(2): BNA scaffold modification
  misc_feature (7)..(7): BNA scaffold modification
  misc_feature (15)..(15): BNA scaffold modification
  misc_feature (20)..(20): BNA scaffold modification
tcaaggaagauggcauuuct

SEQ ID NO: 4539 - RNA, 20 nt, Artificial Sequence
  Antisense oligonucleotide
  misc_feature (1)..(2): BNA scaffold modification
  misc_feature (7)..(7): BNA scaffold modification
  misc_feature (11)..(11): BNA scaffold modification
  misc_feature (15)..(15): BNA scaffold modification
  misc_feature (20)..(20): BNA scaffold modification
tcaaggaagatggcauuuct

SEQ ID NO: 4540 - RNA, 20 nt, Artificial Sequence
  Antisense oligonucleotide
  misc_feature (1)..(2): BNA scaffold modification
  misc_feature (6)..(6): BNA scaffold modification
  misc_feature (10)..(10): BNA scaffold modification
  misc_feature (15)..(15): BNA scaffold modification
  misc_feature (20)..(20): BNA scaffold modification
tcaaggaagauggcauuuct

SEQ ID NO: 4541 - RNA, 20 nt, Artificial Sequence
  Antisense oligonucleotide
  misc_feature (1)..(1): BNA scaffold modification
  misc_feature (9)..(9): BNA scaffold modification
  misc_feature (20)..(20): BNA scaffold modification
tcaaggaagauggcauuuct

SEQ ID NO: 4542 - RNA, 20 nt, Artificial Sequence
  Antisense oligonucleotide
  misc_feature (1)..(1): BNA scaffold modification
  misc_feature (13)..(13): BNA scaffold modification
  misc_feature (20)..(20): BNA scaffold modification
tcaaggaagauggcauuuct

SEQ ID NO: 4543 - RNA, 20 nt, Artificial Sequence
  Antisense oligonucleotide
  misc_feature (1)..(1): BNA scaffold modification
  misc_feature (9)..(9): BNA scaffold modification
  misc_feature (13)..(13): BNA scaffold modification
  misc_feature (20)..(20): BNA scaffold modification
tcaaggaagauggcauuuct

SEQ ID NO: 4544 - RNA, 20 nt, Artificial Sequence
  Antisense oligonucleotide
  misc_feature (1)..(1): BNA scaffold modification
  misc_feature (6)..(6): BNA scaffold modification
  misc_feature (9)..(9): BNA scaffold modification
  misc_feature (13)..(13): BNA scaffold modification
  misc_feature (20)..(20): BNA scaffold modification
tcaaggaagauggcauuuct

SEQ ID NO: 4545 - RNA, 19 nt, Artificial Sequence
  Antisense oligonucleotide
  misc_feature (1)..(2): BNA scaffold modification
  misc_feature (19)..(19): BNA scaffold modification
caaggaagauggcauuuct

SEQ ID NO: 4546 - RNA, 19 nt, Artificial Sequence
  Antisense oligonucleotide
  misc_feature (1)..(2): BNA scaffold modification
  misc_feature (6)..(6): BNA scaffold modification
  misc_feature (14)..(14): BNA scaffold modification
  misc_feature (19)..(19): BNA scaffold modification
caaggaagauggcauuuct

SEQ ID NO: 4547 - RNA, 19 nt, Artificial Sequence
  Antisense oligonucleotide
  misc_feature (1)..(2): BNA scaffold modification
  misc_feature (6)..(6): BNA scaffold modification
  misc_feature (9)..(9): BNA scaffold modification
  misc_feature (14)..(14): BNA scaffold modification
  misc_feature (19)..(19): BNA scaffold modification
caaggaagauggcauuuct

SEQ ID NO: 4548 - RNA, 19 nt, Artificial Sequence
  Antisense oligonucleotide
  misc_feature (1)..(2): BNA scaffold modification
  misc_feature (8)..(8): BNA scaffold modification
  misc_feature (12)..(12): BNA scaffold modification
  misc_feature (19)..(19): BNA scaffold modification
caaggaagauggcauuuct

SEQ ID NO: 4549 - RNA, 19 nt, Artificial Sequence
  Antisense oligonucleotide
  misc_feature (1)..(2): BNA scaffold modification
  misc_feature (8)..(8): BNA scaffold modification
  misc_feature (19)..(19): BNA scaffold modification
caaggaagauggcauuuct

SEQ ID NO: 4550 - RNA, 19 nt, Artificial Sequence
  Antisense oligonucleotide
  misc_feature (1)..(2): BNA scaffold modification
  misc_feature (12)..(12): BNA scaffold modification
  misc_feature (19)..(19): BNA scaffold modification
caaggaagauggcauuuct

SEQ ID NO: 4551 - RNA, 19 nt, Artificial Sequence
  Antisense oligonucleotide
  misc_feature (1)..(2): BNA scaffold modification
  misc_feature (5)..(5): BNA scaffold modification
  misc_feature (8)..(8): BNA scaffold modification
  misc_feature (12)..(12): BNA scaffold modification
  misc_feature (19)..(19): BNA scaffold modification
caaggaagauggcauuuct

SEQ ID NO: 4552 - RNA, 18 nt, Artificial Sequence
  Antisense oligonucleotide
  misc_feature (1)..(1): BNA scaffold modification
  misc_feature (18)..(18): BNA scaffold modification
caaggaagauggcauuuc

SEQ ID NO: 4553 - RNA, 18 nt, Artificial Sequence
  Antisense oligonucleotide
  misc_feature (1)..(2): BNA scaffold modification
  misc_feature (18)..(18): BNA scaffold modification
caaggaagauggcauuuc

SEQ ID NO: 4554 - RNA, 18 nt, Artificial Sequence
  Antisense oligonucleotide
  misc_feature (1)..(2): BNA scaffold modification
  misc_feature (6)..(6): BNA scaffold modification
  misc_feature (14)..(14): BNA scaffold modification
  misc_feature (18)..(18): BNA scaffold modification
caaggaagauggcauuuc

SEQ ID NO: 4555 - RNA, 18 nt, Artificial Sequence
  Antisense oligonucleotide
  misc_feature (1)..(1): BNA scaffold modification
  misc_feature (6)..(6): BNA scaffold modification
  misc_feature (10)..(10): BNA scaffold modification
  misc_feature (14)..(14): BNA scaffold modification
  misc_feature (18)..(18): BNA scaffold modification
caaggaagatggcauuuc

SEQ ID NO: 4556 - RNA, 18 nt, Artificial Sequence
  Antisense oligonucleotide
  misc_feature (1)..(1): BNA scaffold modification
  misc_feature (11)..(11): BNA scaffold modification
  misc_feature (18)..(18): BNA scaffold modification
caaggaagauggcauuuc

SEQ ID NO: 4557 - RNA, 18 nt, Artificial Sequence
  Antisense oligonucleotide
  misc_feature (1)..(1): BNA scaffold modification
  misc_feature (8)..(8): BNA scaffold modification
  misc_feature (18)..(18): BNA scaffold modification
caaggaagauggcauuuc

SEQ ID NO: 4558 - RNA, 18 nt, Artificial Sequence
  Antisense oligonucleotide
  misc_feature (1)..(1): BNA scaffold modification
  misc_feature (8)..(8): BNA scaffold modification
  misc_feature (12)..(12): BNA scaffold modification
  misc_feature (18)..(18): BNA scaffold modification
caaggaagauggcauuuc

SEQ ID NO: 4559 - RNA, 18 nt, Artificial Sequence
  Antisense oligonucleotide
  misc_feature (1)..(1): BNA scaffold modification
  misc_feature (4)..(4): BNA scaffold modification
  misc_feature (8)..(8): BNA scaffold modification
  misc_feature (12)..(12): BNA scaffold modification
  misc_feature (18)..(18): BNA scaffold modification
caaggaagauggcauuuc

SEQ ID NO: 4560 - RNA, 18 nt, Artificial Sequence
  Antisense oligonucleotide
  misc_feature (1)..(1): BNA scaffold modification
  misc_feature (4)..(5): BNA scaffold modification
  misc_feature (8)..(8): BNA scaffold modification
  misc_feature (11)..(12): BNA scaffold modification
  misc_feature (18)..(18): BNA scaffold modification
caaggaagauggcauuuc

SEQ ID NO: 4561 - RNA, 20 nt, Artificial Sequence
  Antisense oligonucleotide
  misc_feature (1)..(2): BNA scaffold modification
  misc_feature (20)..(20): BNA scaffold modification
ctcugugauuuuauaacuug

SEQ ID NO: 4562 - RNA, 17 nt, Artificial Sequence
  Antisense oligonucleotide
  misc_feature (1)..(2): BNA scaffold modification
  misc_feature (17)..(17): BNA scaffold modification
tcacccaccaucaccct

SEQ ID NO: 4563 - RNA, 19 nt, Artificial Sequence
  Antisense oligonucleotide
  misc_feature (1)..(2): BNA scaffold modification
  misc_feature (19)..(19): BNA scaffold modification
tgauauccucaaggucacc

SEQ ID NO: 4564 - RNA, 18 nt, Artificial Sequence
  Antisense oligonucleotide
  misc_feature (1)..(2): BNA scaffold modification
  misc_feature (8)..(8): BNA scaffold modification
  misc_feature (18)..(18): BNA scaffold modification
ctgcuugaugaucaucuc

SEQ ID NO: 4565 - RNA, 18 nt, Artificial Sequence
  Antisense oligonucleotide
  misc_feature (1)..(2): BNA scaffold modification
  misc_feature (10)..(10): BNA scaffold modification
  misc_feature (18)..(18): BNA scaffold modification
gguaaguuctguccaagc

SEQ ID NO: 4566 - RNA, 18 nt, Artificial Sequence
  Antisense oligonucleotide
  misc_feature (1)..(2): BNA scaffold modification
  misc_feature (18)..(18): BNA scaffold modification
gguaaguucuguccaagc

SEQ ID NO: 4567 - RNA, 18 nt, Artificial Sequence
  Antisense oligonucleotide
  misc_feature (1)..(2): BNA scaffold modification
  misc_feature (17)..(18): BNA scaffold modification
gguaaguucuguccaagc

SEQ ID NO: 4568 - RNA, 18 nt, Artificial Sequence
  Antisense oligonucleotide
  misc_feature (1)..(2): BNA scaffold modification
  misc_feature (6)..(6): BNA scaffold modification
  misc_feature (18)..(18): BNA scaffold modification
gguaaguucuguccaagc

SEQ ID NO: 4569 - RNA, 18 nt, Artificial Sequence
  Antisense oligonucleotide
  misc_feature (1)..(2): BNA scaffold modification
  misc_feature (11)..(11): BNA scaffold modification
  misc_feature (18)..(18): BNA scaffold modification
gguaaguucuguccaagc

SEQ ID NO: 4570 - RNA, 18 nt, Artificial Sequence
  Antisense oligonucleotide
  misc_feature (1)..(2): BNA scaffold modification
  misc_feature (6)..(6): BNA scaffold modification
  misc_feature (11)..(11): BNA scaffold modification
  misc_feature (18)..(18): BNA scaffold modification
gguaaguucuguccaagc

SEQ ID NO: 4571 - RNA, 18 nt, Artificial Sequence
  Antisense oligonucleotide
  misc_feature (1)..(2): BNA scaffold modification
  misc_feature (6)..(6): BNA scaffold modification
  misc_feature (11)..(11): BNA scaffold modification
  misc_feature (17)..(18): BNA scaffold modification
gguaaguucuguccaagc

SEQ ID NO: 4572 - RNA, 19 nt, Artificial Sequence
  Antisense oligonucleotide
  misc_feature (1)..(2): BNA scaffold modification
  misc_feature (9)..(9): BNA scaffold modification
  misc_feature (19)..(19): BNA scaffold modification
gtuuccuuaguaaccacag

SEQ ID NO: 4573 - RNA, 18 nt, Artificial Sequence
  Antisense oligonucleotide
  misc_feature (1)..(1): BNA scaffold modification
  misc_feature (3)..(3): BNA scaffold modification
  misc_feature (18)..(18): BNA scaffold modification
cuguugccuccgguucug

SEQ ID NO: 4574 - RNA, 18 nt, Artificial Sequence
  Antisense oligonucleotide
  misc_feature (1)..(1): BNA scaffold modification
  misc_feature (6)..(6): BNA scaffold modification
  misc_feature (18)..(18): BNA scaffold modification
cuguugccuccgguucug

SEQ ID NO: 4575 - RNA, 18 nt, Artificial Sequence
  Antisense oligonucleotide
  misc_feature (1)..(1): BNA scaffold modification
  misc_feature (12)..(12): BNA scaffold modification
  misc_feature (18)..(18): BNA scaffold modification
cuguugccuccgguucug

SEQ ID NO: 4576 - RNA, 18 nt, Artificial Sequence
  Antisense oligonucleotide
  misc_feature (1)..(1): BNA scaffold modification
  misc_feature (13)..(13): BNA scaffold modification
  misc_feature (18)..(18): BNA scaffold modification
cuguugccuccgguucug

SEQ ID NO: 4577 - RNA, 18 nt, Artificial Sequence
  Antisense oligonucleotide
  misc_feature (1)..(1): BNA scaffold modification
  misc_feature (3)..(3): BNA scaffold modification
  misc_feature (13)..(13): BNA scaffold modification
  misc_feature (18)..(18): BNA scaffold modification
cuguugccuccgguucug

SEQ ID NO: 4578 - RNA, 18 nt, Artificial Sequence
  Antisense oligonucleotide
  misc_feature (1)..(1): BNA scaffold modification
  misc_feature (6)..(6): BNA scaffold modification
  misc_feature (12)..(12): BNA scaffold modification
  misc_feature (18)..(18): BNA scaffold modification
cuguugccuccgguucug

SEQ ID NO: 4579 - RNA, 18 nt, Artificial Sequence
  Antisense oligonucleotide
  misc_feature (1)..(1): BNA scaffold modification
  misc_feature (3)..(3): BNA scaffold modification
  misc_feature (6)..(6): BNA scaffold modification
  misc_feature (18)..(18): BNA scaffold modification
cuguugccuccgguucug

SEQ ID NO: 4580 - RNA, 18 nt, Artificial Sequence
  Antisense oligonucleotide
  misc_feature (1)..(1): BNA scaffold modification
  misc_feature (3)..(3): BNA scaffold modification
  misc_feature (6)..(6): BNA scaffold modification
  misc_feature (13)..(13): BNA scaffold modification
  misc_feature (18)..(18): BNA scaffold modification
cuguugccuccgguucug

SEQ ID NO: 4581 - RNA, 18 nt, Artificial Sequence
  Antisense oligonucleotide
  misc_feature (1)..(1): BNA scaffold modification
  misc_feature (7)..(7): BNA scaffold modification
  misc_feature (18)..(18): BNA scaffold modification
cuguugccuccgguucug

SEQ ID NO: 4582 - RNA, 18 nt, Artificial Sequence
  Antisense oligonucleotide
  misc_feature (1)..(1): BNA scaffold modification
  misc_feature (8)..(8): BNA scaffold modification
  misc_feature (18)..(18): BNA scaffold modification
cuguugccuccgguucug

SEQ ID NO: 4583 - RNA, 18 nt, Artificial Sequence
  Antisense oligonucleotide
  misc_feature (1)..(1): BNA scaffold modification
  misc_feature (10)..(10): BNA scaffold modification
  misc_feature (18)..(18): BNA scaffold modification
cuguugccuccgguucug

SEQ ID NO: 4584 - RNA, 18 nt, Artificial Sequence
  Antisense oligonucleotide
  misc_feature (1)..(1): BNA scaffold modification
  misc_feature (11)..(11): BNA scaffold modification
  misc_feature (18)..(18): BNA scaffold modification
cuguugccuccgguucug

SEQ ID NO: 4585 - RNA, 18 nt, Artificial Sequence
  Antisense oligonucleotide
  misc_feature (1)..(1): BNA scaffold modification
  misc_feature (16)..(16): BNA scaffold modification
  misc_feature (18)..(18): BNA scaffold modification
cuguugccuccgguucug

SEQ ID NO: 4586 - RNA, 18 nt, Artificial Sequence
  Antisense oligonucleotide
  misc_feature (1)..(1): BNA scaffold modification
  misc_feature (8)..(8): BNA scaffold modification
  misc_feature (16)..(16): BNA scaffold modification
  misc_feature (18)..(18): BNA scaffold modification
cuguugccuccgguucug

SEQ ID NO: 4587 - RNA, 18 nt, Artificial Sequence
  Antisense oligonucleotide
  misc_feature (1)..(1): BNA scaffold modification
  misc_feature (7)..(7): BNA scaffold modification
  misc_feature (10)..(10): BNA scaffold modification
  misc_feature (18)..(18): BNA scaffold modification
cuguugccuccgguucug

SEQ ID NO: 4588 - RNA, 18 nt, Artificial Sequence
  Antisense oligonucleotide
  misc_feature (1)..(2): BNA scaffold modification
  misc_feature (17)..(18): BNA scaffold modification
ctguugccuccgguuctg

SEQ ID NO: 4589 - RNA, 18 nt, Artificial Sequence
  Antisense oligonucleotide
  misc_feature (1)..(2): BNA scaffold modification
  misc_feature (6)..(6): BNA scaffold modification
  misc_feature (13)..(13): BNA scaffold modification
  misc_feature (17)..(18): BNA scaffold modification
ctguugccuccgguuctg

SEQ ID NO: 4590 - RNA, 18 nt, Artificial Sequence
  Antisense oligonucleotide
  misc_feature (1)..(2): BNA scaffold modification
  misc_feature (8)..(8): BNA scaffold modification
  misc_feature (13)..(13): BNA scaffold modification
  misc_feature (17)..(18): BNA scaffold modification
ctguugccuccgguuctg

SEQ ID NO: 4591 - RNA, 16 nt, Artificial Sequence
  Antisense oligonucleotide
  misc_feature (1)..(1): BNA scaffold modification
  misc_feature (16)..(16): BNA scaffold modification
cuguugccuccgguuc

SEQ ID NO: 4592 - RNA, 16 nt, Artificial Sequence
  Antisense oligonucleotide
  misc_feature (1)..(1): BNA scaffold modification
  misc_feature (3)..(3): BNA scaffold modification
  misc_feature (16)..(16): BNA scaffold modification
cuguugccuccgguuc

SEQ ID NO: 4593 - RNA, 16 nt, Artificial Sequence
  Antisense oligonucleotide
  misc_feature (1)..(1): BNA scaffold modification
  misc_feature (6)..(6): BNA scaffold modification
  misc_feature (16)..(16): BNA scaffold modification
cuguugccuccgguuc

SEQ ID NO: 4594 - RNA, 16 nt, Artificial Sequence
  Antisense oligonucleotide
  misc_feature (1)..(1): BNA scaffold modification
  misc_feature (13)..(13): BNA scaffold modification
  misc_feature (16)..(16): BNA scaffold modification
cuguugccuccgguuc

SEQ ID NO: 4595 - RNA, 16 nt, Artificial Sequence
  Antisense oligonucleotide
  misc_feature (1)..(1): BNA scaffold modification
  misc_feature (3)..(3): BNA scaffold modification
  misc_feature (13)..(13): BNA scaffold modification
  misc_feature (16)..(16): BNA scaffold modification
cuguugccuccgguuc

SEQ ID NO: 4596 - RNA, 16 nt, Artificial Sequence
  Antisense oligonucleotide
  misc_feature (1)..(1): BNA scaffold modification
  misc_feature (6)..(6): BNA scaffold modification
  misc_feature (12)..(12): BNA scaffold modification
  misc_feature (16)..(16): BNA scaffold modification
cuguugccuccgguuc

SEQ ID NO: 4597 - RNA, 16 nt, Artificial Sequence
  Antisense oligonucleotide
  misc_feature (1)..(1): BNA scaffold modification
  misc_feature (8)..(8): BNA scaffold modification
  misc_feature (16)..(16): BNA scaffold modification
cuguugccuccgguuc

SEQ ID NO: 4598 - RNA, 16 nt, Artificial Sequence
  Antisense oligonucleotide
  misc_feature (1)..(1): BNA scaffold modification
  misc_feature (10)..(10): BNA scaffold modification
  misc_feature (16)..(16): BNA scaffold modification
cuguugccuccgguuc

SEQ ID NO: 4599 - RNA, 16 nt, Artificial Sequence
  Antisense oligonucleotide
  misc_feature (1)..(1): BNA scaffold modification
  misc_feature (8)..(8): BNA scaffold modification
  misc_feature (10)..(10): BNA scaffold modification
  misc_feature (16)..(16): BNA scaffold modification
cuguugccuccgguuc

SEQ ID NO: 4600 - RNA, 16 nt, Artificial Sequence
  Antisense oligonucleotide
  misc_feature (1)..(2): BNA scaffold modification
  misc_feature (15)..(16): BNA scaffold modification
ctguugccuccggutc

SEQ ID NO: 4601 - RNA, 16 nt, Artificial Sequence
  Antisense oligonucleotide
  misc_feature (1)..(2): BNA scaffold modification
  misc_feature (6)..(6): BNA scaffold modification
  misc_feature (15)..(16): BNA scaffold modification
ctguugccuccggutc

SEQ ID NO: 4602 - RNA, 16 nt, Artificial Sequence
  Antisense oligonucleotide
  misc_feature (1)..(2): BNA scaffold modification
  misc_feature (6)..(6): BNA scaffold modification
  misc_feature (13)..(13): BNA scaffold modification
  misc_feature (15)..(16): BNA scaffold modification
ctguugccuccggutc

SEQ ID NO: 4603 - RNA, 16 nt, Artificial Sequence
  Antisense oligonucleotide
  misc_feature (1)..(1): BNA scaffold modification
  misc_feature (16)..(16): BNA scaffold modification
guugccuccgguucug

SEQ ID NO: 4604 - RNA, 16 nt, Artificial Sequence
  Antisense oligonucleotide
  misc_feature (1)..(1): BNA scaffold modification
  misc_feature (4)..(4): BNA scaffold modification
  misc_feature (16)..(16): BNA scaffold modification
guugccuccgguucug

SEQ ID NO: 4605 - RNA, 16 nt, Artificial Sequence
  Antisense oligonucleotide
  misc_feature (1)..(1): BNA scaffold modification
  misc_feature (11)..(11): BNA scaffold modification
  misc_feature (16)..(16): BNA scaffold modification
guugccuccgguucug

SEQ ID NO: 4606 - RNA, 16 nt, Artificial Sequence
  Antisense oligonucleotide
  misc_feature (1)..(1): BNA scaffold modification
  misc_feature (4)..(4): BNA scaffold modification
  misc_feature (11)..(11): BNA scaffold modification
  misc_feature (16)..(16): BNA scaffold modification
guugccuccgguucug

SEQ ID NO: 4607 - RNA, 16 nt, Artificial Sequence
  Antisense oligonucleotide
  misc_feature (1)..(1): BNA scaffold modification
  misc_feature (14)..(14): BNA scaffold modification
  misc_feature (16)..(16): BNA scaffold modification
guugccuccgguucug

SEQ ID NO: 4608 - RNA, 16 nt, Artificial Sequence
  Antisense oligonucleotide
  misc_feature (1)..(1): BNA scaffold modification
  misc_feature (8)..(8): BNA scaffold modification
  misc_feature (16)..(16): BNA scaffold modification
guugccuccgguucug

SEQ ID NO: 4609 - RNA, 16 nt, Artificial Sequence
  Antisense oligonucleotide
  misc_feature (1)..(1): BNA scaffold modification
  misc_feature (16)..(16): BNA scaffold modification
guugccuccgguucug

SEQ ID NO: 4610 - RNA, 16 nt, Artificial Sequence
  Antisense oligonucleotide
  misc_feature (1)..(1): BNA scaffold modification
  misc_feature (6)..(6): BNA scaffold modification
  misc_feature (16)..(16): BNA scaffold modification
guugccuccgguucug

SEQ ID NO: 4611 - RNA, 16 nt, Artificial Sequence
  Antisense oligonucleotide
  misc_feature (1)..(1): BNA scaffold modification
  misc_feature (6)..(6): BNA scaffold modification
  misc_feature (14)..(14): BNA scaffold modification
  misc_feature (16)..(16): BNA scaffold modification
guugccuccgguucug

SEQ ID NO: 4612 - RNA, 16 nt, Artificial Sequence
  Antisense oligonucleotide
  misc_feature (1)..(1): BNA scaffold modification
  misc_feature (8)..(8): BNA scaffold modification
  misc_feature (14)..(14): BNA scaffold modification
  misc_feature (16)..(16): BNA scaffold modification
guugccuccgguucug

SEQ ID NO: 4613 - RNA, 16 nt, Artificial Sequence
  Antisense oligonucleotide
  misc_feature (1)..(1): BNA scaffold modification
  misc_feature (6)..(6): BNA scaffold modification
  misc_feature (8)..(8): BNA scaffold modification
  misc_feature (16)..(16): BNA scaffold modification
guugccuccgguucug

SEQ ID NO: 4614 - RNA, 16 nt, Artificial Sequence
  Antisense oligonucleotide
  misc_feature (1)..(2): BNA scaffold modification
  misc_feature (15)..(16): BNA scaffold modification
gtugccuccgguuctg

SEQ ID NO: 4615 - RNA, 16 nt, Artificial Sequence
  Antisense oligonucleotide
  misc_feature (1)..(2): BNA scaffold modification
  misc_feature (4)..(4): BNA scaffold modification
  misc_feature (11)..(11): BNA scaffold modification
  misc_feature (15)..(16): BNA scaffold modification
gtugccuccgguuctg

SEQ ID NO: 4616 - RNA, 16 nt, Artificial Sequence
  Antisense oligonucleotide
  misc_feature (1)..(2): BNA scaffold modification
  misc_feature (6)..(6): BNA scaffold modification
  misc_feature (8)..(8): BNA scaffold modification
  misc_feature (15)..(16): BNA scaffold modification
gtugccuccgguuctg

SEQ ID NO: 4617 - RNA, 16 nt, Artificial Sequence
  Antisense oligonucleotide
  misc_feature (1)..(1): BNA scaffold modification
  misc_feature (16)..(16): BNA scaffold modification
tguugccuccgguuct

SEQ ID NO: 4618 - RNA, 16 nt, Artificial Sequence
  Antisense oligonucleotide
  misc_feature (1)..(1): BNA scaffold modification
  misc_feature (5)..(5): BNA scaffold modification
  misc_feature (16)..(16): BNA scaffold modification
tguugccuccgguuct

SEQ ID NO: 4619 - RNA, 16 nt, Artificial Sequence
  Antisense oligonucleotide
  misc_feature (1)..(1): BNA scaffold modification
  misc_feature (12)..(12): BNA scaffold modification
  misc_feature (16)..(16): BNA scaffold modification
tguugccuccgguuct

SEQ ID NO: 4620 - RNA, 16 nt, Artificial Sequence
  Antisense oligonucleotide
  misc_feature (1)..(1): BNA scaffold modification
  misc_feature (5)..(5): BNA scaffold modification
  misc_feature (12)..(12): BNA scaffold modification
  misc_feature (16)..(16): BNA scaffold modification
tguugccuccgguuct

SEQ ID NO: 4621 - RNA, 16 nt, Artificial Sequence
  Antisense oligonucleotide
  misc_feature (1)..(1): BNA scaffold modification
  misc_feature (7)..(7): BNA scaffold modification
  misc_feature (16)..(16): BNA scaffold modification
tguugccuccgguuct

SEQ ID NO: 4622 - RNA, 16 nt, Artificial Sequence
  Antisense oligonucleotide
  misc_feature (1)..(1): BNA scaffold modification
  misc_feature (9)..(9): BNA scaffold modification
  misc_feature (16)..(16): BNA scaffold modification
tguugccuccgguuct

SEQ ID NO: 4623 - RNA, 16 nt, Artificial Sequence
  Antisense oligonucleotide
  misc_feature (1)..(1): BNA scaffold modification
  misc_feature (7)..(7): BNA scaffold modification
  misc_feature (9)..(9): BNA scaffold modification
  misc_feature (16)..(16): BNA scaffold modification
tguugccuccgguuct

SEQ ID NO: 4624 - RNA, 16 nt, Artificial Sequence
  Antisense oligonucleotide
  misc_feature (1)..(2): BNA scaffold modification
  misc_feature (15)..(16): BNA scaffold modification
tguugccuccgguuct

SEQ ID NO: 4625 - RNA, 16 nt, Artificial Sequence
  Antisense oligonucleotide
  misc_feature (1)..(2): BNA scaffold modification
  misc_feature (5)..(5): BNA scaffold modification
  misc_feature (15)..(16): BNA scaffold modification
tguugccuccgguuct

SEQ ID NO: 4626 - RNA, 16 nt, Artificial Sequence
  Antisense oligonucleotide
  misc_feature (1)..(2): BNA scaffold modification
  misc_feature (12)..(12): BNA scaffold modification
  misc_feature (15)..(16): BNA scaffold modification
tguugccuccgguuct

SEQ ID NO: 4627 - RNA, 16 nt, Artificial Sequence
  Antisense oligonucleotide
  misc_feature (1)..(2): BNA scaffold modification
  misc_feature (5)..(5): BNA scaffold modification
  misc_feature (12)..(12): BNA scaffold modification
  misc_feature (15)..(16): BNA scaffold modification
tguugccuccgguuct

SEQ ID NO: 4628 - RNA, 16 nt, Artificial Sequence
  Antisense oligonucleotide
  misc_feature (1)..(2): BNA scaffold modification
  misc_feature (9)..(9): BNA scaffold modification
  misc_feature (15)..(16): BNA scaffold modification
tguugccuccgguuct

SEQ ID NO: 4629 - RNA, 16 nt, Artificial Sequence
  Antisense oligonucleotide
  misc_feature (1)..(2): BNA scaffold modification
  misc_feature (7)..(7): BNA scaffold modification
  misc_feature (15)..(16): BNA scaffold modification
tguugccuccgguuct

SEQ ID NO: 4630 - RNA, 16 nt, Artificial Sequence
  Antisense oligonucleotide
  misc_feature (1)..(2): BNA scaffold modification
  misc_feature (7)..(7): BNA scaffold modification
  misc_feature (9)..(9): BNA scaffold modification
  misc_feature (15)..(16): BNA scaffold modification
tguugccuccgguuct

SEQ ID NO: 4631 - RNA, 25 nt, Artificial Sequence
  Antisense oligonucleotide
  misc_feature (1)..(1): BNA scaffold modification
  misc_feature (4)..(4): BNA scaffold modification
  misc_feature (25)..(25): BNA scaffold modification
guugccuccgguucugaagguguuc

SEQ ID NO: 4632 - RNA, 25 nt, Artificial Sequence
  Antisense oligonucleotide
  misc_feature (1)..(1): BNA scaffold modification
  misc_feature (11)..(11): BNA scaffold modification
  misc_feature (25)..(25): BNA scaffold modification
guugccuccgguucugaagguguuc

SEQ ID NO: 4633 - RNA, 25 nt, Artificial Sequence
  Antisense oligonucleotide
  misc_feature (1)..(1): BNA scaffold modification
  misc_feature (16)..(16): BNA scaffold modification
  misc_feature (25)..(25): BNA scaffold modification
guugccuccgguucugaagguguuc

SEQ ID NO: 4634 - RNA, 25 nt, Artificial Sequence
  Antisense oligonucleotide
  misc_feature (1)..(1): BNA scaffold modification
  misc_feature (20)..(20): BNA scaffold modification
  misc_feature (25)..(25): BNA scaffold modification
guugccuccgguucugaagguguuc

SEQ ID NO: 4635 - RNA, 25 nt, Artificial Sequence
  Antisense oligonucleotide
  misc_feature (1)..(1): BNA scaffold modification
  misc_feature (22)..(22): BNA scaffold modification
  misc_feature (25)..(25): BNA scaffold modification
guugccuccgguucugaagguguuc

SEQ ID NO: 4636 - RNA, 25 nt, Artificial Sequence
  Antisense oligonucleotide
  misc_feature (1)..(1): BNA scaffold modification
  misc_feature (16)..(16): BNA scaffold modification
  misc_feature (22)..(22): BNA scaffold modification
  misc_feature (25)..(25): BNA scaffold modification
guugccuccgguucugaagguguuc

SEQ ID NO: 4637 - RNA, 25 nt, Artificial Sequence
  Antisense oligonucleotide
  misc_feature (1)..(1): BNA scaffold modification
  misc_feature (11)..(11): BNA scaffold modification
  misc_feature (16)..(16): BNA scaffold modification
  misc_feature (25)..(25): BNA scaffold modification
guugccuccgguucugaagguguuc

SEQ ID NO: 4638 - RNA, 25 nt, Artificial Sequence
  Antisense oligonucleotide
  misc_feature (1)..(1): BNA scaffold modification
  misc_feature (4)..(4): BNA scaffold modification
  misc_feature (11)..(11): BNA scaffold modification
  misc_feature (25)..(25): BNA scaffold modification
guugccuccgguucugaagguguuc

SEQ ID NO: 4639 - RNA, 25 nt, Artificial Sequence
  Antisense oligonucleotide
  misc_feature (1)..(1): BNA scaffold modification
  misc_feature (4)..(4): BNA scaffold modification
  misc_feature (22)..(22): BNA scaffold modification
  misc_feature (25)..(25): BNA scaffold modification
guugccuccgguucugaagguguuc

SEQ ID NO: 4640 - RNA, 25 nt, Artificial Sequence
  Antisense oligonucleotide
  misc_feature (1)..(1): BNA scaffold modification
  misc_feature (14)..(14): BNA scaffold modification
  misc_feature (25)..(25): BNA scaffold modification
guugccuccgguucugaagguguuc

SEQ ID NO: 4641 - RNA, 25 nt, Artificial Sequence
  Antisense oligonucleotide
  misc_feature (1)..(1): BNA scaffold modification
  misc_feature (6)..(6): BNA scaffold modification
  misc_feature (25)..(25): BNA scaffold modification
guugccuccgguucugaagguguuc

SEQ ID NO: 4642 - RNA, 25 nt, Artificial Sequence
  Antisense oligonucleotide
  misc_feature (1)..(1): BNA scaffold modification
  misc_feature (8)..(8): BNA scaffold modification
  misc_feature (25)..(25): BNA scaffold modification
guugccuccgguucugaagguguuc

SEQ ID NO: 4643 - RNA, 25 nt, Artificial Sequence
  Antisense oligonucleotide
  misc_feature (1)..(1): BNA scaffold modification
  misc_feature (8)..(8): BNA scaffold modification
  misc_feature (14)..(14): BNA scaffold modification
  misc_feature (25)..(25): BNA scaffold modification
guugccuccgguucugaagguguuc

SEQ ID NO: 4644 - RNA, 25 nt, Artificial Sequence
  Antisense oligonucleotide
  misc_feature (1)..(2): BNA scaffold modification
  misc_feature (24)..(25): BNA scaffold modification
gtugccuccgguucugaaggugutc

SEQ ID NO: 4645 - RNA, 25 nt, Artificial Sequence
  Antisense oligonucleotide
  misc_feature (1)..(2): BNA scaffold modification
  misc_feature (11)..(11): BNA scaffold modification
  misc_feature (24)..(25): BNA scaffold modification
gtugccuccgguucugaaggugutc

SEQ ID NO: 4646 - RNA, 25 nt, Artificial Sequence
  Antisense oligonucleotide
  misc_feature (1)..(2): BNA scaffold modification
  misc_feature (16)..(16): BNA scaffold modification
  misc_feature (24)..(25): BNA scaffold modification
gtugccuccgguucugaaggugutc

SEQ ID NO: 4647 - RNA, 25 nt, Artificial Sequence
  Antisense oligonucleotide
  misc_feature (1)..(2): BNA scaffold modification
  misc_feature (14)..(14): BNA scaffold modification
  misc_feature (24)..(25): BNA scaffold modification
gtugccuccgguucugaaggugutc

SEQ ID NO: 4648 - RNA, 22 nt, Artificial Sequence
  Antisense oligonucleotide
  misc_feature (1)..(1): BNA scaffold modification
  misc_feature (22)..(22): BNA scaffold modification
guugccuccgguucugaaggug

SEQ ID NO: 4649 - RNA, 22 nt, Artificial Sequence
  Antisense oligonucleotide
  misc_feature (1)..(1): BNA scaffold modification
  misc_feature (4)..(4): BNA scaffold modification
  misc_feature (22)..(22): BNA scaffold modification
guugccuccgguucugaaggug

SEQ ID NO: 4650 - RNA, 22 nt, Artificial Sequence
  Antisense oligonucleotide
  misc_feature (1)..(1): BNA scaffold modification
  misc_feature (11)..(11): BNA scaffold modification
  misc_feature (22)..(22): BNA scaffold modification
guugccuccgguucugaaggug

SEQ ID NO: 4651 - RNA, 22 nt, Artificial Sequence
  Antisense oligonucleotide
  misc_feature (1)..(1): BNA scaffold modification
  misc_feature (16)..(16): BNA scaffold modification
  misc_feature (22)..(22): BNA scaffold modification
guugccuccgguucugaaggug

SEQ ID NO: 4652 - RNA, 22 nt, Artificial Sequence
  Antisense oligonucleotide
  misc_feature (1)..(1): BNA scaffold modification
  misc_feature (20)..(20): BNA scaffold modification
  misc_feature (22)..(22): BNA scaffold modification
guugccuccgguucugaaggug

SEQ ID NO: 4653 - RNA, 22 nt, Artificial Sequence
  Antisense oligonucleotide
  misc_feature (1)..(1): BNA scaffold modification
  misc_feature (16)..(16): BNA scaffold modification
  misc_feature (20)..(20): BNA scaffold modification
  misc_feature (22)..(22): BNA scaffold modification
guugccuccgguucugaaggug

SEQ ID NO: 4654 - RNA, 22 nt, Artificial Sequence
  Antisense oligonucleotide
  misc_feature (1)..(1): BNA scaffold modification
  misc_feature (11)..(11): BNA scaffold modification
  misc_feature (16)..(16): BNA scaffold modification
  misc_feature (22)..(22): BNA scaffold modification
guugccuccgguucugaaggug

SEQ ID NO: 4655 - RNA, 22 nt, Artificial Sequence
  Antisense oligonucleotide
  misc_feature (1)..(1): BNA scaffold modification
  misc_feature (4)..(4): BNA scaffold modification
  misc_feature (11)..(11): BNA scaffold modification
  misc_feature (22)..(22): BNA scaffold modification
guugccuccgguucugaaggug

SEQ ID NO: 4656 - RNA, 22 nt, Artificial Sequence
  Antisense oligonucleotide
  misc_feature (1)..(1): BNA scaffold modification
  misc_feature (14)..(14): BNA scaffold modification
  misc_feature (22)..(22): BNA scaffold modification
guugccuccgguucugaaggug

SEQ ID NO: 4657 - RNA, 22 nt, Artificial Sequence
  Antisense oligonucleotide
  misc_feature (1)..(1): BNA scaffold modification
  misc_feature (8)..(8): BNA scaffold modification
  misc_feature (22)..(22): BNA scaffold modification
guugccuccgguucugaaggug

SEQ ID NO: 4658 - RNA, 22 nt, Artificial Sequence
  Antisense oligonucleotide
  misc_feature (1)..(1): BNA scaffold modification
  misc_feature (6)..(6): BNA scaffold modification
  misc_feature (14)..(14): BNA scaffold modification
  misc_feature (22)..(22): BNA scaffold modification
guugccuccgguucugaaggug

SEQ ID NO: 4659 - RNA, 22 nt, Artificial Sequence
  Antisense oligonucleotide
  misc_feature (1)..(2): BNA scaffold modification
  misc_feature (21)..(22): BNA scaffold modification
gtugccuccgguucugaaggtg

SEQ ID NO: 4660 - RNA, 22 nt, Artificial Sequence
  Antisense oligonucleotide
  misc_feature (1)..(2): BNA scaffold modification
  misc_feature (16)..(16): BNA scaffold modification
  misc_feature (21)..(22): BNA scaffold modification
gtugccuccgguucugaaggtg

SEQ ID NO: 4661 - RNA, 22 nt, Artificial Sequence
  Antisense oligonucleotide
  misc_feature (1)..(2): BNA scaffold modification
  misc_feature (14)..(14): BNA scaffold modification
  misc_feature (21)..(22): BNA scaffold modification
gtugccuccgguucugaaggtg

SEQ ID NO: 4662 - RNA, 22 nt, Artificial Sequence
  Antisense oligonucleotide
  misc_feature (1)..(2): BNA scaffold modification
  misc_feature (6)..(6): BNA scaffold modification
  misc_feature (21)..(22): BNA scaffold modification
gtugccuccgguucugaaggtg

SEQ ID NO: 4663 - RNA, 22 nt, Artificial Sequence
  Antisense oligonucleotide
  misc_feature (1)..(1): BNA scaffold modification
  misc_feature (22)..(22): BNA scaffold modification
tugccuccgguucugaaggugt

SEQ ID NO: 4664 - RNA, 22 nt, Artificial Sequence
  Antisense oligonucleotide
  misc_feature (1)..(1): BNA scaffold modification
  misc_feature (3)..(3): BNA scaffold modification
  misc_feature (22)..(22): BNA scaffold modification
tugccuccgguucugaaggugt

SEQ ID NO: 4665 - RNA, 22 nt, Artificial Sequence
  Antisense oligonucleotide
  misc_feature (1)..(1): BNA scaffold modification
  misc_feature (10)..(10): BNA scaffold modification
  misc_feature (22)..(22): BNA scaffold modification
tugccuccgguucugaaggugt

SEQ ID NO: 4666 - RNA, 22 nt, Artificial Sequence
  Antisense oligonucleotide
  misc_feature (1)..(1): BNA scaffold modification
  misc_feature (15)..(15): BNA scaffold modification
  misc_feature (22)..(22): BNA scaffold modification
tugccuccgguucugaaggugt

SEQ ID NO: 4667 - RNA, 22 nt, Artificial Sequence
  Antisense oligonucleotide
  misc_feature (1)..(1): BNA scaffold modification
  misc_feature (19)..(19): BNA scaffold modification
  misc_feature (22)..(22): BNA scaffold modification
tugccuccgguucugaaggugt

SEQ ID NO: 4668 - RNA, 22 nt, Artificial Sequence
  Antisense oligonucleotide
  misc_feature (1)..(1): BNA scaffold modification
  misc_feature (3)..(3): BNA scaffold modification
  misc_feature (19)..(19): BNA scaffold modification
  misc_feature (22)..(22): BNA scaffold modification
tugccuccgguucugaaggugt

SEQ ID NO: 4669 - RNA, 22 nt, Artificial Sequence
  Antisense oligonucleotide
  misc_feature (1)..(1): BNA scaffold modification
  misc_feature (10)..(10): BNA scaffold modification
  misc_feature (15)..(15): BNA scaffold modification
  misc_feature (22)..(22): BNA scaffold modification
tugccuccgguucugaaggugt

SEQ ID NO: 4670 - RNA, 22 nt, Artificial Sequence
  Antisense oligonucleotide
  misc_feature (1)..(1): BNA scaffold modification
  misc_feature (13)..(13): BNA scaffold modification
  misc_feature (22)..(22): BNA scaffold modification
tugccuccgguucugaaggugt

SEQ ID NO: 4671 - RNA, 22 nt, Artificial Sequence
  Antisense oligonucleotide
  misc_feature (1)..(1): BNA scaffold modification
  misc_feature (5)..(5): BNA scaffold modification
  misc_feature (22)..(22): BNA scaffold modification
tugccuccgguucugaaggugt

SEQ ID NO: 4672 - RNA, 22 nt, Artificial Sequence
  Antisense oligonucleotide
  misc_feature (1)..(1): BNA scaffold modification
  misc_feature (5)..(5): BNA scaffold modification
  misc_feature (13)..(13): BNA scaffold modification
  misc_feature (22)..(22): BNA scaffold modification
tugccuccgguucugaaggugt

SEQ ID NO: 4673 - RNA, 22 nt, Artificial Sequence
  Antisense oligonucleotide
  misc_feature (1)..(1): BNA scaffold modification
  misc_feature (5)..(5): BNA scaffold modification
  misc_feature (18)..(18): BNA scaffold modification
  misc_feature (22)..(22): BNA scaffold modification
tugccuccgguucugaaggugt

SEQ ID NO: 4674 - RNA, 22 nt, Artificial Sequence
  Antisense oligonucleotide
  misc_feature (1)..(2): BNA scaffold modification
  misc_feature (21)..(22): BNA scaffold modification
ttgccuccgguucugaaggugt

SEQ ID NO: 4675 - RNA, 22 nt, Artificial Sequence
  Antisense oligonucleotide
  misc_feature (1)..(2): BNA scaffold modification
  misc_feature (15)..(15): BNA scaffold modification
  misc_feature (21)..(22): BNA scaffold modification
ttgccuccgguucugaaggugt

SEQ ID NO: 4676 - RNA, 22 nt, Artificial Sequence
  Antisense oligonucleotide
  misc_feature (1)..(2): BNA scaffold modification
  misc_feature (13)..(13): BNA scaffold modification
  misc_feature (21)..(22): BNA scaffold modification
ttgccuccgguucugaaggugt

SEQ ID NO: 4677 - RNA, 22 nt, Artificial Sequence
  Antisense oligonucleotide
  misc_feature (1)..(2): BNA scaffold modification
  misc_feature (10)..(10): BNA scaffold modification
  misc_feature (15)..(15): BNA scaffold modification
  misc_feature (21)..(22): BNA scaffold modification
ttgccuccgguucugaaggugt

SEQ ID NO: 4678 - RNA, 22 nt, Artificial Sequence
  Antisense oligonucleotide
  misc_feature (1)..(1): BNA scaffold modification
  misc_feature (22)..(22): BNA scaffold modification
tgccuccgguucugaaggugut

SEQ ID NO: 4679 - RNA, 22 nt, Artificial Sequence
  Antisense oligonucleotide
  misc_feature (1)..(1): BNA scaffold modification
  misc_feature (4)..(4): BNA scaffold modification
  misc_feature (22)..(22): BNA scaffold modification
tgccuccgguucugaaggugut

SEQ ID NO: 4680 - RNA, 22 nt, Artificial Sequence
  Antisense oligonucleotide
  misc_feature (1)..(1): BNA scaffold modification
  misc_feature (9)..(9): BNA scaffold modification
  misc_feature (22)..(22): BNA scaffold modification
tgccuccgguucugaaggugut

SEQ ID NO: 4681 - RNA, 22 nt, Artificial Sequence
  Antisense oligonucleotide
  misc_feature (1)..(1): BNA scaffold modification
  misc_feature (12)..(12): BNA scaffold modification
  misc_feature (22)..(22): BNA scaffold modification
tgccuccgguucugaaggugut

SEQ ID NO: 4682 - RNA, 22 nt, Artificial Sequence
  Antisense oligonucleotide
  misc_feature (1)..(1): BNA scaffold modification
  misc_feature (14)..(14): BNA scaffold modification
  misc_feature (22)..(22): BNA scaffold modification
tgccuccgguucugaaggugut

SEQ ID NO: 4683 - RNA, 22 nt, Artificial Sequence
  Antisense oligonucleotide
  misc_feature (1)..(1): BNA scaffold modification
  misc_feature (17)..(17): BNA scaffold modification
  misc_feature (22)..(22): BNA scaffold modification
tgccuccgguucugaaggugut

SEQ ID NO: 4684 - RNA, 22 nt, Artificial Sequence
  Antisense oligonucleotide
  misc_feature (1)..(1): BNA scaffold modification
  misc_feature (18)..(18): BNA scaffold modification
  misc_feature (22)..(22): BNA scaffold modification
tgccuccgguucugaaggugut

SEQ ID NO: 4685 - RNA, 22 nt, Artificial Sequence
  Antisense oligonucleotide
  misc_feature (1)..(1): BNA scaffold modification
  misc_feature (20)..(20): BNA scaffold modification
  misc_feature (22)..(22): BNA scaffold modification
tgccuccgguucugaaggugut

SEQ ID NO: 4686 - RNA, 22 nt, Artificial Sequence
  Antisense oligonucleotide
  misc_feature (1)..(1): BNA scaffold modification
  misc_feature (4)..(4): BNA scaffold modification
  misc_feature (20)..(20): BNA scaffold modification
  misc_feature (22)..(22): BNA scaffold modification
tgccuccgguucugaaggugut

SEQ ID NO: 4687 - RNA, 22 nt, Artificial Sequence
  Antisense oligonucleotide
  misc_feature (1)..(1): BNA scaffold modification
  misc_feature (9)..(9): BNA scaffold modification
  misc_feature (14)..(14): BNA scaffold modification
  misc_feature (22)..(22): BNA scaffold modification
tgccuccgguucugaaggugut

SEQ ID NO: 4688 - RNA, 22 nt, Artificial Sequence
  Antisense oligonucleotide
  misc_feature (1)..(1): BNA scaffold modification
  misc_feature (12)..(12): BNA scaffold modification
  misc_feature (17)..(17): BNA scaffold modification
  misc_feature (22)..(22): BNA scaffold modification
tgccuccgguucugaaggugut

SEQ ID NO: 4689 - RNA, 22 nt, Artificial Sequence
  Antisense oligonucleotide
  misc_feature (1)..(2): BNA scaffold modification
  misc_feature (21)..(22): BNA scaffold modification
tgccuccgguucugaaggugtt

SEQ ID NO: 4690 - RNA, 22 nt, Artificial Sequence
  Antisense oligonucleotide
  misc_feature (1)..(2): BNA scaffold modification
  misc_feature (9)..(9): BNA scaffold modification
  misc_feature (21)..(22): BNA scaffold modification
tgccuccgguucugaaggugtt

SEQ ID NO: 4691 - RNA, 22 nt, Artificial Sequence
  Antisense oligonucleotide
  misc_feature (1)..(2): BNA scaffold modification
  misc_feature (14)..(14): BNA scaffold modification
  misc_feature (21)..(22): BNA scaffold modification
tgccuccgguucugaaggugtt

SEQ ID NO: 4692 - RNA, 22 nt, Artificial Sequence
  Antisense oligonucleotide
  misc_feature (1)..(2): BNA scaffold modification
  misc_feature (4)..(4): BNA scaffold modification
  misc_feature (18)..(18): BNA scaffold modification
  misc_feature (21)..(22): BNA scaffold modification
tgccuccgguucugaaggugtt

SEQ ID NO: 4693 - RNA, 22 nt, Artificial Sequence
  Antisense oligonucleotide
  misc_feature (1)..(1): BNA scaffold modification
  misc_feature (22)..(22): BNA scaffold modification
gccuccgguucugaagguguuc

SEQ ID NO: 4694 - RNA, 22 nt, Artificial Sequence
  Antisense oligonucleotide
  misc_feature (1)..(1): BNA scaffold modification
  misc_feature (8)..(8): BNA scaffold modification
  misc_feature (22)..(22): BNA scaffold modification
gccuccgguucugaagguguuc

SEQ ID NO: 4695 - RNA, 22 nt, Artificial Sequence
  Antisense oligonucleotide
  misc_feature (1)..(1): BNA scaffold modification
  misc_feature (13)..(13): BNA scaffold modification
  misc_feature (22)..(22): BNA scaffold modification
gccuccgguucugaagguguuc

SEQ ID NO: 4696 - RNA, 22 nt, Artificial Sequence
  Antisense oligonucleotide
  misc_feature (1)..(1): BNA scaffold modification
  misc_feature (19)..(19): BNA scaffold modification
  misc_feature (22)..(22): BNA scaffold modification
gccuccgguucugaagguguuc

SEQ ID NO: 4697 - RNA, 22 nt, Artificial Sequence
  Antisense oligonucleotide
  misc_feature (1)..(1): BNA scaffold modification
  misc_feature (8)..(8): BNA scaffold modification
  misc_feature (19)..(19): BNA scaffold modification
  misc_feature (22)..(22): BNA scaffold modification
gccuccgguucugaagguguuc

SEQ ID NO: 4698 - RNA, 22 nt, Artificial Sequence
  Antisense oligonucleotide
  misc_feature (1)..(1): BNA scaffold modification
  misc_feature (13)..(13): BNA scaffold modification
  misc_feature (17)..(17): BNA scaffold modification
  misc_feature (22)..(22): BNA scaffold modification
gccuccgguucugaagguguuc

SEQ ID NO: 4699 - RNA, 22 nt, Artificial Sequence
  Antisense oligonucleotide
  misc_feature (1)..(1): BNA scaffold modification
  misc_feature (11)..(11): BNA scaffold modification
  misc_feature (22)..(22): BNA scaffold modification
gccuccgguucugaagguguuc

SEQ ID NO: 4700 - RNA, 22 nt, Artificial Sequence
  Antisense oligonucleotide
  misc_feature (1)..(1): BNA scaffold modification
  misc_feature (3)..(3): BNA scaffold modification
  misc_feature (11)..(11): BNA scaffold modification
  misc_feature (22)..(22): BNA scaffold modification
gccuccgguucugaagguguuc

SEQ ID NO: 4701 - RNA, 22 nt, Artificial Sequence
  Antisense oligonucleotide
  misc_feature (1)..(1): BNA scaffold modification
  misc_feature (5)..(5): BNA scaffold modification
  misc_feature (11)..(11): BNA scaffold modification
  misc_feature (19)..(19): BNA scaffold modification
  misc_feature (22)..(22): BNA scaffold modification
gccuccgguucugaagguguuc

SEQ ID NO: 4702 - RNA, 22 nt, Artificial Sequence
  Antisense oligonucleotide
  misc_feature (1)..(2): BNA scaffold modification
  misc_feature (21)..(22): BNA scaffold modification
gccuccgguucugaaggugutc

SEQ ID NO: 4703 - RNA, 22 nt, Artificial Sequence
  Antisense oligonucleotide
  misc_feature (1)..(2): BNA scaffold modification
  misc_feature (11)..(11): BNA scaffold modification
  misc_feature (21)..(22): BNA scaffold modification
gccuccgguucugaaggugutc

SEQ ID NO: 4704 - RNA, 22 nt, Artificial Sequence
  Antisense oligonucleotide
  misc_feature (1)..(2): BNA scaffold modification
  misc_feature (13)..(13): BNA scaffold modification
  misc_feature (21)..(22): BNA scaffold modification
gccuccgguucugaaggugutc

SEQ ID NO: 4705 - RNA, 22 nt, Artificial Sequence
  Antisense oligonucleotide
  misc_feature (1)..(2): BNA scaffold modification
  misc_feature (8)..(8): BNA scaffold modification
  misc_feature (16)..(16): BNA scaffold modification
  misc_feature (21)..(22): BNA scaffold modification
gccuccgguucugaaggugutc

SEQ ID NO: 4706 - RNA, 20 nt, Artificial Sequence
  Antisense oligonucleotide
  misc_feature (1)..(1): BNA scaffold modification
  misc_feature (20)..(20): BNA scaffold modification
guugccuccgguucugaagg

SEQ ID NO: 4707 - RNA, 20 nt, Artificial Sequence
  Antisense oligonucleotide
  misc_feature (1)..(1): BNA scaffold modification
  misc_feature (4)..(4): BNA scaffold modification
  misc_feature (20)..(20): BNA scaffold modification
guugccuccgguucugaagg

SEQ ID NO: 4708 - RNA, 20 nt, Artificial Sequence
  Antisense oligonucleotide
  misc_feature (1)..(1): BNA scaffold modification
  misc_feature (11)..(11): BNA scaffold modification
  misc_feature (20)..(20): BNA scaffold modification
guugccuccgguucugaagg

SEQ ID NO: 4709 - RNA, 20 nt, Artificial Sequence
  Antisense oligonucleotide
  misc_feature (1)..(1): BNA scaffold modification
  misc_feature (14)..(14): BNA scaffold modification
  misc_feature (20)..(20): BNA scaffold modification
guugccuccgguucugaagg

SEQ ID NO: 4710 - RNA, 20 nt, Artificial Sequence
  Antisense oligonucleotide
  misc_feature (1)..(1): BNA scaffold modification
  misc_feature (16)..(16): BNA scaffold modification
  misc_feature (20)..(20): BNA scaffold modification
guugccuccgguucugaagg

SEQ ID NO: 4711 - RNA, 20 nt, Artificial Sequence
  Antisense oligonucleotide
  misc_feature (1)..(1): BNA scaffold modification
  misc_feature (4)..(4): BNA scaffold modification
  misc_feature (16)..(16): BNA scaffold modification
  misc_feature (20)..(20): BNA scaffold modification
guugccuccgguucugaagg

SEQ ID NO: 4712 - RNA, 20 nt, Artificial Sequence
  Antisense oligonucleotide
  misc_feature (1)..(1): BNA scaffold modification
  misc_feature (11)..(11): BNA scaffold modification
  misc_feature (16)..(16): BNA scaffold modification
  misc_feature (20)..(20): BNA scaffold modification
guugccuccgguucugaagg

SEQ ID NO: 4713 - RNA, 20 nt, Artificial Sequence
  Antisense oligonucleotide
  misc_feature (1)..(1): BNA scaffold modification
  misc_feature (6)..(6): BNA scaffold modification
  misc_feature (14)..(14): BNA scaffold modification
  misc_feature (20)..(20): BNA scaffold modification
guugccuccgguucugaagg

SEQ ID NO: 4714 - RNA, 20 nt, Artificial Sequence
  Antisense oligonucleotide
  misc_feature (1)..(1): BNA scaffold modification
  misc_feature (6)..(6): BNA scaffold modification
  misc_feature (11)..(11): BNA scaffold modification
  misc_feature (16)..(16): BNA scaffold modification
  misc_feature (20)..(20): BNA scaffold modification
guugccuccgguucugaagg

SEQ ID NO: 4715 - RNA, 20 nt, Artificial Sequence
  Antisense oligonucleotide
  misc_feature (1)..(2): BNA scaffold modification
  misc_feature (19)..(20): BNA scaffold modification
gtugccuccgguucugaagg

SEQ ID NO: 4716 - RNA, 20 nt, Artificial Sequence
  Antisense oligonucleotide
  misc_feature (1)..(2): BNA scaffold modification
  misc_feature (11)..(11): BNA scaffold modification
  misc_feature (19)..(20): BNA scaffold modification
gtugccuccgguucugaagg

SEQ ID NO: 4717 - RNA, 20 nt, Artificial Sequence
  Antisense oligonucleotide
  misc_feature (1)..(2): BNA scaffold modification
  misc_feature (14)..(14): BNA scaffold modification
  misc_feature (19)..(20): BNA scaffold modification
gtugccuccgguucugaagg

SEQ ID NO: 4718 - RNA, 20 nt, Artificial Sequence
  Antisense oligonucleotide
  misc_feature (1)..(2): BNA scaffold modification
  misc_feature (6)..(6): BNA scaffold modification
  misc_feature (16)..(16): BNA scaffold modification
  misc_feature (19)..(20): BNA scaffold modification
gtugccuccgguucugaagg

SEQ ID NO: 4719 - RNA, 20 nt, Artificial Sequence
  Antisense oligonucleotide
  misc_feature (1)..(1): BNA scaffold modification
  misc_feature (20)..(20): BNA scaffold modification
tugccuccgguucugaaggt

SEQ ID NO: 4720 - RNA, 20 nt, Artificial Sequence
  Antisense oligonucleotide
  misc_feature (1)..(1): BNA scaffold modification
  misc_feature (3)..(3): BNA scaffold modification
  misc_feature (20)..(20): BNA scaffold modification
tugccuccgguucugaaggt

SEQ ID NO: 4721 - RNA, 20 nt, Artificial Sequence
  Antisense oligonucleotide
  misc_feature (1)..(1): BNA scaffold modification
  misc_feature (10)..(10): BNA scaffold modification
  misc_feature (20)..(20): BNA scaffold modification
tugccuccgguucugaaggt

SEQ ID NO: 4722 - RNA, 20 nt, Artificial Sequence
  Antisense oligonucleotide
  misc_feature (1)..(1): BNA scaffold modification
  misc_feature (15)..(15): BNA scaffold modification
  misc_feature (20)..(20): BNA scaffold modification
tugccuccgguucugaaggt

SEQ ID NO: 4723 - RNA, 20 nt, Artificial Sequence
  Antisense oligonucleotide
  misc_feature (1)..(1): BNA scaffold modification
  misc_feature (3)..(3): BNA scaffold modification
  misc_feature (15)..(15): BNA scaffold modification
  misc_feature (20)..(20): BNA scaffold modification
tugccuccgguucugaaggt

SEQ ID NO: 4724 - RNA, 20 nt, Artificial Sequence
  Antisense oligonucleotide
  misc_feature (1)..(1): BNA scaffold modification
  misc_feature (5)..(5): BNA scaffold modification
  misc_feature (13)..(13): BNA scaffold modification
  misc_feature (20)..(20): BNA scaffold modification
tugccuccgguucugaaggt

SEQ ID NO: 4725 - RNA, 20 nt, Artificial Sequence
  Antisense oligonucleotide
  misc_feature (1)..(1): BNA scaffold modification
  misc_feature (13)..(13): BNA scaffold modification
  misc_feature (20)..(20): BNA scaffold modification
tugccuccgguucugaaggt

SEQ ID NO: 4726 - RNA, 20 nt, Artificial Sequence
  Antisense oligonucleotide
  misc_feature (1)..(1): BNA scaffold modification
  misc_feature (5)..(5): BNA scaffold modification
  misc_feature (20)..(20): BNA scaffold modification
tugccuccgguucugaaggt

SEQ ID NO: 4727 - RNA, 20 nt, Artificial Sequence
  Antisense oligonucleotide
  misc_feature (1)..(1): BNA scaffold modification
  misc_feature (5)..(5): BNA scaffold modification
  misc_feature (15)..(15): BNA scaffold modification
  misc_feature (20)..(20): BNA scaffold modification
tugccuccgguucugaaggt

SEQ ID NO: 4728 - RNA, 20 nt, Artificial Sequence
  Antisense oligonucleotide
  misc_feature (1)..(1): BNA scaffold modification
  misc_feature (15)..(15): BNA scaffold modification
  misc_feature (19)..(20): BNA scaffold modification
tugccuccgguucugaaggt

SEQ ID NO: 4729 - RNA, 20 nt, Artificial Sequence
  Antisense oligonucleotide
  misc_feature (1)..(2): BNA scaffold modification
  misc_feature (13)..(13): BNA scaffold modification
  misc_feature (20)..(20): BNA scaffold modification
ttgccuccgguucugaaggt

SEQ ID NO: 4730 - RNA, 20 nt, Artificial Sequence
  Antisense oligonucleotide
  misc_feature (1)..(2): BNA scaffold modification
  misc_feature (19)..(20): BNA scaffold modification
ttgccuccgguucugaaggt

SEQ ID NO: 4731 - RNA, 20 nt, Artificial Sequence
  Antisense oligonucleotide
  misc_feature (1)..(2): BNA scaffold modification
  misc_feature (15)..(15): BNA scaffold modification
  misc_feature (19)..(20): BNA scaffold modification
ttgccuccgguucugaaggt

SEQ ID NO: 4732 - RNA, 20 nt, Artificial Sequence
  Antisense oligonucleotide
  misc_feature (1)..(1): BNA scaffold modification
  misc_feature (20)..(20): BNA scaffold modification
tgccuccgguucugaaggug

SEQ ID NO: 4733 - RNA, 20 nt, Artificial Sequence
  Antisense oligonucleotide
  misc_feature (1)..(1): BNA scaffold modification
  misc_feature (9)..(9): BNA scaffold modification
  misc_feature (20)..(20): BNA scaffold modification
tgccuccgguucugaaggug

SEQ ID NO: 4734 - RNA, 20 nt, Artificial Sequence
  Antisense oligonucleotide
  misc_feature (1)..(1): BNA scaffold modification
  misc_feature (14)..(14): BNA scaffold modification
  misc_feature (20)..(20): BNA scaffold modification
tgccuccgguucugaaggug

SEQ ID NO: 4735 - RNA, 20 nt, Artificial Sequence
  Antisense oligonucleotide
  misc_feature (1)..(1): BNA scaffold modification
  misc_feature (18)..(18): BNA scaffold modification
  misc_feature (20)..(20): BNA scaffold modification
tgccuccgguucugaaggug

SEQ ID NO: 4736 - RNA, 20 nt, Artificial Sequence
  Antisense oligonucleotide
  misc_feature (1)..(1): BNA scaffold modification
  misc_feature (14)..(14): BNA scaffold modification
  misc_feature (18)..(18): BNA scaffold modification
  misc_feature (20)..(20): BNA scaffold modification
tgccuccgguucugaaggug

SEQ ID NO: 4737 - RNA, 20 nt, Artificial Sequence
  Antisense oligonucleotide
  misc_feature (1)..(1): BNA scaffold modification
  misc_feature (9)..(9): BNA scaffold modification
  misc_feature (14)..(14): BNA scaffold modification
  misc_feature (20)..(20): BNA scaffold modification
tgccuccgguucugaaggug

SEQ ID NO: 4738 - RNA, 20 nt, Artificial Sequence
  Antisense oligonucleotide
  misc_feature (1)..(1): BNA scaffold modification
  misc_feature (4)..(4): BNA scaffold modification
  misc_feature (20)..(20): BNA scaffold modification
tgccuccgguucugaaggug

SEQ ID NO: 4739 - RNA, 20 nt, Artificial Sequence
  Antisense oligonucleotide
  misc_feature (1)..(1): BNA scaffold modification
  misc_feature (12)..(12): BNA scaffold modification
  misc_feature (20)..(20): BNA scaffold modification
tgccuccgguucugaaggug

SEQ ID NO: 4740 - RNA, 20 nt, Artificial Sequence
  Antisense oligonucleotide
  misc_feature (1)..(1): BNA scaffold modification
  misc_feature (4)..(4): BNA scaffold modification
  misc_feature (12)..(12): BNA scaffold modification
  misc_feature (20)..(20): BNA scaffold modification
tgccuccgguucugaaggug

SEQ ID NO: 4741 - RNA, 20 nt, Artificial Sequence
  Antisense oligonucleotide
  misc_feature (1)..(1): BNA scaffold modification
  misc_feature (6)..(6): BNA scaffold modification
  misc_feature (14)..(14): BNA scaffold modification
  misc_feature (20)..(20): BNA scaffold modification
tgccuccgguucugaaggug

SEQ ID NO: 4742 - RNA, 20 nt, Artificial Sequence
  Antisense oligonucleotide
  misc_feature (1)..(2): BNA scaffold modification
  misc_feature (19)..(20): BNA scaffold modification
tgccuccgguucugaaggtg

SEQ ID NO: 4743 - RNA, 20 nt, Artificial Sequence
  Antisense oligonucleotide
  misc_feature (1)..(2): BNA scaffold modification
  misc_feature (12)..(12): BNA scaffold modification
  misc_feature (19)..(20): BNA scaffold modification
tgccuccgguucugaaggtg

SEQ ID NO: 4744 - RNA, 20 nt, Artificial Sequence
  Antisense oligonucleotide
  misc_feature (1)..(2): BNA scaffold modification
  misc_feature (14)..(14): BNA scaffold modification
  misc_feature (19)..(20): BNA scaffold modification
tgccuccgguucugaaggtg

SEQ ID NO: 4745 - RNA, 20 nt, Artificial Sequence
  Antisense oligonucleotide
  misc_feature (1)..(2): BNA scaffold modification
  misc_feature (9)..(9): BNA scaffold modification
  misc_feature (14)..(14): BNA scaffold modification
  misc_feature (19)..(20): BNA scaffold modification
tgccuccgguucugaaggtg

SEQ ID NO: 4746 - RNA, 20 nt, Artificial Sequence
  Antisense oligonucleotide
  misc_feature (1)..(1): BNA scaffold modification
  misc_feature (20)..(20): BNA scaffold modification
gccuccgguucugaaggugt

SEQ ID NO: 4747 - RNA, 20 nt, Artificial Sequence
  Antisense oligonucleotide
  misc_feature (1)..(1): BNA scaffold modification
  misc_feature (5)..(5): BNA scaffold modification
  misc_feature (20)..(20): BNA scaffold modification
gccuccgguucugaaggugt

SEQ ID NO: 4748 - RNA, 20 nt, Artificial Sequence
  Antisense oligonucleotide
  misc_feature (1)..(1): BNA scaffold modification
  misc_feature (8)..(8): BNA scaffold modification
  misc_feature (20)..(20): BNA scaffold modification
gccuccgguucugaaggugt

SEQ ID NO: 4749 - RNA, 20 nt, Artificial Sequence
  Antisense oligonucleotide
  misc_feature (1)..(1): BNA scaffold modification
  misc_feature (11)..(11): BNA scaffold modification
  misc_feature (20)..(20): BNA scaffold modification
gccuccgguucugaaggugt

SEQ ID NO: 4750 - RNA, 20 nt, Artificial Sequence
  Antisense oligonucleotide
  misc_feature (1)..(1): BNA scaffold modification
  misc_feature (13)..(13): BNA scaffold modification
  misc_feature (20)..(20): BNA scaffold modification
gccuccgguucugaaggugt

SEQ ID NO: 4751 - RNA, 20 nt, Artificial Sequence
  Antisense oligonucleotide
  misc_feature (1)..(1): BNA scaffold modification
  misc_feature (17)..(17): BNA scaffold modification
  misc_feature (20)..(20): BNA scaffold modification
gccuccgguucugaaggugt

SEQ ID NO: 4752 - RNA, 20 nt, Artificial Sequence
  Antisense oligonucleotide
  misc_feature (1)..(1): BNA scaffold modification
  misc_feature (8)..(8): BNA scaffold modification
  misc_feature (16)..(16): BNA scaffold modification
  misc_feature (20)..(20): BNA scaffold modification
gccuccgguucugaaggugt

SEQ ID NO: 4753 - RNA, 20 nt, Artificial Sequence
  Antisense oligonucleotide
  misc_feature (1)..(1): BNA scaffold modification
  misc_feature (3)..(3): BNA scaffold modification
  misc_feature (13)..(13): BNA scaffold modification
  misc_feature (20)..(20): BNA scaffold modification
gccuccgguucugaaggugt

SEQ ID NO: 4754 - RNA, 20 nt, Artificial Sequence
  Antisense oligonucleotide
  misc_feature (1)..(1): BNA scaffold modification
  misc_feature (11)..(11): BNA scaffold modification
  misc_feature (16)..(16): BNA scaffold modification
  misc_feature (20)..(20): BNA scaffold modification
gccuccgguucugaaggugt

SEQ ID NO: 4755 - RNA, 20 nt, Artificial Sequence
  Antisense oligonucleotide
  misc_feature (1)..(1): BNA scaffold modification
  misc_feature (8)..(8): BNA scaffold modification
  misc_feature (13)..(13): BNA scaffold modification
  misc_feature (17)..(17): BNA scaffold modification
  misc_feature (20)..(20): BNA scaffold modification
gccuccgguucugaaggugt

SEQ ID NO: 4756 - RNA, 20 nt, Artificial Sequence
  Antisense oligonucleotide
  misc_feature (1)..(2): BNA scaffold modification
  misc_feature (19)..(20): BNA scaffold modification
gccuccgguucugaaggugt

SEQ ID NO: 4757 - RNA, 20 nt, Artificial Sequence
  Antisense oligonucleotide
  misc_feature (1)..(2): BNA scaffold modification
  misc_feature (13)..(13): BNA scaffold modification
  misc_feature (19)..(20): BNA scaffold modification
gccuccgguucugaaggugt

SEQ ID NO: 4758 - RNA, 20 nt, Artificial Sequence
  Antisense oligonucleotide
  misc_feature (1)..(2): BNA scaffold modification
  misc_feature (8)..(8): BNA scaffold modification
  misc_feature (13)..(13): BNA scaffold modification
  misc_feature (19)..(20): BNA scaffold modification
gccuccgguucugaaggugt

SEQ ID NO: 4759 - RNA, 20 nt, Artificial Sequence
  Antisense oligonucleotide
  misc_feature (1)..(1): BNA scaffold modification
  misc_feature (20)..(20): BNA scaffold modification
ccuccgguucugaaggugut

SEQ ID NO: 4760 - RNA, 20 nt, Artificial Sequence
  Antisense oligonucleotide
  misc_feature (1)..(1): BNA scaffold modification
  misc_feature (7)..(7): BNA scaffold modification
  misc_feature (20)..(20): BNA scaffold modification
ccuccgguucugaaggugut

SEQ ID NO: 4761 - RNA, 20 nt, Artificial Sequence
  Antisense oligonucleotide
  misc_feature (1)..(1): BNA scaffold modification
  misc_feature (10)..(10): BNA scaffold modification
  misc_feature (20)..(20): BNA scaffold modification
ccuccgguucugaaggugut

SEQ ID NO: 4762 - RNA, 20 nt, Artificial Sequence
  Antisense oligonucleotide
  misc_feature (1)..(1): BNA scaffold modification
  misc_feature (12)..(12): BNA scaffold modification
  misc_feature (20)..(20): BNA scaffold modification
ccuccgguucugaaggugut

SEQ ID NO: 4763 - RNA, 20 nt, Artificial Sequence
  Antisense oligonucleotide
  misc_feature (1)..(1): BNA scaffold modification
  misc_feature (15)..(15): BNA scaffold modification
  misc_feature (20)..(20): BNA scaffold modification
ccuccgguucugaaggugut

SEQ ID NO: 4764 - RNA, 20 nt, Artificial Sequence
  Antisense oligonucleotide
  misc_feature (1)..(1): BNA scaffold modification
  misc_feature (18)..(18): BNA scaffold modification
  misc_feature (20)..(20): BNA scaffold modification
ccuccgguucugaaggugut

SEQ ID NO: 4765 - RNA, 20 nt, Artificial Sequence
  Antisense oligonucleotide
  misc_feature (1)..(1): BNA scaffold modification
  misc_feature (10)..(10): BNA scaffold modification
  misc_feature (18)..(18): BNA scaffold modification
  misc_feature (20)..(20): BNA scaffold modification
ccuccgguucugaaggugut

SEQ ID NO: 4766 - RNA, 20 nt, Artificial Sequence
  Antisense oligonucleotide
  misc_feature (1)..(1): BNA scaffold modification
  misc_feature (12)..(12): BNA scaffold modification
  misc_feature (18)..(18): BNA scaffold modification
  misc_feature (20)..(20): BNA scaffold modification
ccuccgguucugaaggugut

SEQ ID NO: 4767 - RNA, 20 nt, Artificial Sequence
  Antisense oligonucleotide
  misc_feature (1)..(1): BNA scaffold modification
  misc_feature (7)..(7): BNA scaffold modification
  misc_feature (12)..(12): BNA scaffold modification
  misc_feature (16)..(16): BNA scaffold modification
  misc_feature (20)..(20): BNA scaffold modification
ccuccgguucugaaggugut

SEQ ID NO: 4768 - RNA, 20 nt, Artificial Sequence
  Antisense oligonucleotide
  misc_feature (1)..(1): BNA scaffold modification
  misc_feature (4)..(4): BNA scaffold modification
  misc_feature (10)..(10): BNA scaffold modification
  misc_feature (20)..(20): BNA scaffold modification
ccuccgguucugaaggugut

SEQ ID NO: 4769 - RNA, 20 nt, Artificial Sequence
  Antisense oligonucleotide
  misc_feature (1)..(2): BNA scaffold modification
  misc_feature (19)..(20): BNA scaffold modification
ccuccgguucugaaggugtt

SEQ ID NO: 4770 - RNA, 20 nt, Artificial Sequence
  Antisense oligonucleotide
  misc_feature (1)..(2): BNA scaffold modification
  misc_feature (12)..(12): BNA scaffold modification
  misc_feature (19)..(20): BNA scaffold modification
ccuccgguucugaaggugtt

SEQ ID NO: 4771 - RNA, 20 nt, Artificial Sequence
  Antisense oligonucleotide
  misc_feature (1)..(2): BNA scaffold modification
  misc_feature (10)..(10): BNA scaffold modification
  misc_feature (12)..(12): BNA scaffold modification
  misc_feature (19)..(20): BNA scaffold modification
ccuccgguucugaaggugtt

SEQ ID NO: 4772 - RNA, 20 nt, Artificial Sequence
  Antisense oligonucleotide
  misc_feature (1)..(1): BNA scaffold modification
  misc_feature (20)..(20): BNA scaffold modification
cuccgguucugaagguguuc

SEQ ID NO: 4773 - RNA, 20 nt, Artificial Sequence
  Antisense oligonucleotide
  misc_feature (1)..(1): BNA scaffold modification
  misc_feature (6)..(6): BNA scaffold modification
  misc_feature (20)..(20): BNA scaffold modification
cuccgguucugaagguguuc

SEQ ID NO: 4774 - RNA, 20 nt, Artificial Sequence
  Antisense oligonucleotide
  misc_feature (1)..(1): BNA scaffold modification
  misc_feature (9)..(9): BNA scaffold modification
  misc_feature (20)..(20): BNA scaffold modification
cuccgguucugaagguguuc

SEQ ID NO: 4775 - RNA, 20 nt, Artificial Sequence
  Antisense oligonucleotide
  misc_feature (1)..(1): BNA scaffold modification
  misc_feature (11)..(11): BNA scaffold modification
  misc_feature (20)..(20): BNA scaffold modification
cuccgguucugaagguguuc

SEQ ID NO: 4776 - RNA, 20 nt, Artificial Sequence
  Antisense oligonucleotide
  misc_feature (1)..(1): BNA scaffold modification
  misc_feature (15)..(15): BNA scaffold modification
  misc_feature (20)..(20): BNA scaffold modification
cuccgguucugaagguguuc

SEQ ID NO: 4777 - RNA, 20 nt, Artificial Sequence
  Antisense oligonucleotide
  misc_feature (1)..(1): BNA scaffold modification
  misc_feature (17)..(17): BNA scaffold modification
  misc_feature (20)..(20): BNA scaffold modification
cuccgguucugaagguguuc

SEQ ID NO: 4778 - RNA, 20 nt, Artificial Sequence
  Antisense oligonucleotide
  misc_feature (1)..(1): BNA scaffold modification
  misc_feature (9)..(9): BNA scaffold modification
  misc_feature (17)..(17): BNA scaffold modification
  misc_feature (20)..(20): BNA scaffold modification
cuccgguucugaagguguuc

SEQ ID NO: 4779 - RNA, 20 nt, Artificial Sequence
  Antisense oligonucleotide
  misc_feature (1)..(1): BNA scaffold modification
  misc_feature (11)..(11): BNA scaffold modification
  misc_feature (17)..(17): BNA scaffold modification
  misc_feature (20)..(20): BNA scaffold modification
cuccgguucugaagguguuc

SEQ ID NO: 4780 - RNA, 20 nt, Artificial Sequence
  Antisense oligonucleotide
  misc_feature (1)..(1): BNA scaffold modification
  misc_feature (6)..(6): BNA scaffold modification
  misc_feature (11)..(11): BNA scaffold modification
  misc_feature (20)..(20): BNA scaffold modification
cuccgguucugaagguguuc

SEQ ID NO: 4781 - RNA, 20 nt, Artificial Sequence
  Antisense oligonucleotide
  misc_feature (1)..(1): BNA scaffold modification
  misc_feature (6)..(6): BNA scaffold modification
  misc_feature (11)..(11): BNA scaffold modification
  misc_feature (17)..(17): BNA scaffold modification
  misc_feature (20)..(20): BNA scaffold modification
cuccgguucugaagguguuc

SEQ ID NO: 4782 - RNA, 20 nt, Artificial Sequence
  Antisense oligonucleotide
  misc_feature (1)..(2): BNA scaffold modification
  misc_feature (19)..(20): BNA scaffold modification
ctccgguucugaaggugutc

SEQ ID NO: 4783 - RNA, 20 nt, Artificial Sequence
  Antisense oligonucleotide
  misc_feature (1)..(2): BNA scaffold modification
  misc_feature (9)..(9): BNA scaffold modification
  misc_feature (19)..(20): BNA scaffold modification
ctccgguucugaaggugutc

SEQ ID NO: 4784 - RNA, 20 nt, Artificial Sequence
  Antisense oligonucleotide
  misc_feature (1)..(2): BNA scaffold modification
  misc_feature (9)..(9): BNA scaffold modification
  misc_feature (17)..(17): BNA scaffold modification
  misc_feature (19)..(20): BNA scaffold modification
ctccgguucugaaggugutc

SEQ ID NO: 4785 - RNA, 18 nt, Artificial Sequence
  Antisense oligonucleotide
  misc_feature (1)..(1): BNA scaffold modification
  misc_feature (18)..(18): BNA scaffold modification
guugccuccgguucugaa

SEQ ID NO: 4786 - RNA, 18 nt, Artificial Sequence
  Antisense oligonucleotide
  misc_feature (1)..(1): BNA scaffold modification
  misc_feature (16)..(16): BNA scaffold modification
  misc_feature (18)..(18): BNA scaffold modification
guugccuccgguucugaa

SEQ ID NO: 4787 - RNA, 18 nt, Artificial Sequence
  Antisense oligonucleotide
  misc_feature (1)..(1): BNA scaffold modification
  misc_feature (14)..(14): BNA scaffold modification
  misc_feature (18)..(18): BNA scaffold modification
guugccuccgguucugaa

SEQ ID NO: 4788 - RNA, 18 nt, Artificial Sequence
  Antisense oligonucleotide
  misc_feature (1)..(1): BNA scaffold modification
  misc_feature (11)..(11): BNA scaffold modification
  misc_feature (18)..(18): BNA scaffold modification
guugccuccgguucugaa

SEQ ID NO: 4789 - RNA, 18 nt, Artificial Sequence
  Antisense oligonucleotide
  misc_feature (1)..(1): BNA scaffold modification
  misc_feature (8)..(8): BNA scaffold modification
  misc_feature (18)..(18): BNA scaffold modification
guugccuccgguucugaa

SEQ ID NO: 4790 - RNA, 18 nt, Artificial Sequence
  Antisense oligonucleotide
  misc_feature (1)..(1): BNA scaffold modification
  misc_feature (4)..(4): BNA scaffold modification
  misc_feature (18)..(18): BNA scaffold modification
guugccuccgguucugaa

SEQ ID NO: 4791 - RNA, 18 nt, Artificial Sequence
  Antisense oligonucleotide
  misc_feature (1)..(1): BNA scaffold modification
  misc_feature (4)..(4): BNA scaffold modification
  misc_feature (16)..(16): BNA scaffold modification
  misc_feature (18)..(18): BNA scaffold modification
guugccuccgguucugaa

SEQ ID NO: 4792 - RNA, 18 nt, Artificial Sequence
  Antisense oligonucleotide
  misc_feature (1)..(1): BNA scaffold modification
  misc_feature (6)..(6): BNA scaffold modification
  misc_feature (14)..(14): BNA scaffold modification
  misc_feature (18)..(18): BNA scaffold modification
guugccuccgguucugaa

SEQ ID NO: 4793 - RNA, 18 nt, Artificial Sequence
  Antisense oligonucleotide
  misc_feature (1)..(1): BNA scaffold modification
  misc_feature (11)..(11): BNA scaffold modification
  misc_feature (16)..(16): BNA scaffold modification
  misc_feature (18)..(18): BNA scaffold modification
guugccuccgguucugaa

SEQ ID NO: 4794 - RNA, 18 nt, Artificial Sequence
  Antisense oligonucleotide
  misc_feature (1)..(2): BNA scaffold modification
  misc_feature (17)..(18): BNA scaffold modification
gtugccuccgguucugaa

SEQ ID NO: 4795 - RNA, 18 nt, Artificial Sequence
  Antisense oligonucleotide
  misc_feature (1)..(2): BNA scaffold modification
  misc_feature (14)..(14): BNA scaffold modification
  misc_feature (17)..(18): BNA scaffold modification
gtugccuccgguucugaa

SEQ ID NO: 4796 - RNA, 18 nt, Artificial Sequence
  Antisense oligonucleotide
  misc_feature (1)..(1): BNA scaffold modification
  misc_feature (18)..(18): BNA scaffold modification
tugccuccgguucugaag

SEQ ID NO: 4797 - RNA, 18 nt, Artificial Sequence
  Antisense oligonucleotide
  misc_feature (1)..(1): BNA scaffold modification
  misc_feature (5)..(5): BNA scaffold modification
  misc_feature (18)..(18): BNA scaffold modification
tugccuccgguucugaag

SEQ ID NO: 4798 - RNA, 18 nt, Artificial Sequence
  Antisense oligonucleotide
  misc_feature (1)..(1): BNA scaffold modification
  misc_feature (10)..(10): BNA scaffold modification
  misc_feature (18)..(18): BNA scaffold modification
tugccuccgguucugaag

SEQ ID NO: 4799 - RNA, 18 nt, Artificial Sequence
  Antisense oligonucleotide
  misc_feature (1)..(1): BNA scaffold modification
  misc_feature (13)..(13): BNA scaffold modification
  misc_feature (18)..(18): BNA scaffold modification
tugccuccgguucugaag

SEQ ID NO: 4800 - RNA, 18 nt, Artificial Sequence
  Antisense oligonucleotide
  misc_feature (1)..(1): BNA scaffold modification
  misc_feature (15)..(15): BNA scaffold modification
  misc_feature (18)..(18): BNA scaffold modification
tugccuccgguucugaag

SEQ ID NO: 4801 - RNA, 18 nt, Artificial Sequence
  Antisense oligonucleotide
  misc_feature (1)..(1): BNA scaffold modification
  misc_feature (4)..(4): BNA scaffold modification
  misc_feature (18)..(18): BNA scaffold modification
tugccuccgguucugaag

SEQ ID NO: 4802 - RNA, 18 nt, Artificial Sequence
  Antisense oligonucleotide
  misc_feature (1)..(1): BNA scaffold modification
  misc_feature (10)..(10): BNA scaffold modification
  misc_feature (15)..(15): BNA scaffold modification
  misc_feature (18)..(18): BNA scaffold modification
tugccuccgguucugaag

SEQ ID NO: 4803 - RNA, 18 nt, Artificial Sequence
  Antisense oligonucleotide
  misc_feature (1)..(1): BNA scaffold modification
  misc_feature (5)..(5): BNA scaffold modification
  misc_feature (13)..(13): BNA scaffold modification
  misc_feature (18)..(18): BNA scaffold modification
tugccuccgguucugaag

SEQ ID NO: 4804 - RNA, 18 nt, Artificial Sequence
  Antisense oligonucleotide
  misc_feature (1)..(2): BNA scaffold modification
  misc_feature (17)..(18): BNA scaffold modification
ttgccuccgguucugaag

SEQ ID NO: 4805 - RNA, 18 nt, Artificial Sequence
  Antisense oligonucleotide
  misc_feature (1)..(2): BNA scaffold modification
  misc_feature (15)..(15): BNA scaffold modification
  misc_feature (17)..(18): BNA scaffold modification
ttgccuccgguucugaag

SEQ ID NO: 4806 - RNA, 18 nt, Artificial Sequence
  Antisense oligonucleotide
  misc_feature (1)..(2): BNA scaffold modification
  misc_feature (13)..(13): BNA scaffold modification
  misc_feature (17)..(18): BNA scaffold modification
ttgccuccgguucugaag

SEQ ID NO: 4807 - RNA, 18 nt, Artificial Sequence
  Antisense oligonucleotide
  misc_feature (1)..(1): BNA scaffold modification
  misc_feature (18)..(18): BNA scaffold modification
tgccuccgguucugaagg

SEQ ID NO: 4808 - RNA, 18 nt, Artificial Sequence
  Antisense oligonucleotide
  misc_feature (1)..(1): BNA scaffold modification
  misc_feature (14)..(14): BNA scaffold modification
  misc_feature (18)..(18): BNA scaffold modification
tgccuccgguucugaagg

SEQ ID NO: 4809 - RNA, 18 nt, Artificial Sequence
  Antisense oligonucleotide
  misc_feature (1)..(1): BNA scaffold modification
  misc_feature (12)..(12): BNA scaffold modification
  misc_feature (18)..(18): BNA scaffold modification
tgccuccgguucugaagg

SEQ ID NO: 4810 - RNA, 18 nt, Artificial Sequence
  Antisense oligonucleotide
  misc_feature (1)..(1): BNA scaffold modification
  misc_feature (9)..(9): BNA scaffold modification
  misc_feature (18)..(18): BNA scaffold modification
tgccuccgguucugaagg

SEQ ID NO: 4811 - RNA, 18 nt, Artificial Sequence
  Antisense oligonucleotide
  misc_feature (1)..(1): BNA scaffold modification
  misc_feature (4)..(4): BNA scaffold modification
  misc_feature (18)..(18): BNA scaffold modification
tgccuccgguucugaagg

SEQ ID NO: 4812 - RNA, 18 nt, Artificial Sequence
  Antisense oligonucleotide
  misc_feature (1)..(1): BNA scaffold modification
  misc_feature (9)..(9): BNA scaffold modification
  misc_feature (14)..(14): BNA scaffold modification
  misc_feature (18)..(18): BNA scaffold modification
tgccuccgguucugaagg

SEQ ID NO: 4813 - RNA, 18 nt, Artificial Sequence
  Antisense oligonucleotide
  misc_feature (1)..(1): BNA scaffold modification
  misc_feature (4)..(4): BNA scaffold modification
  misc_feature (12)..(12): BNA scaffold modification
  misc_feature (18)..(18): BNA scaffold modification
tgccuccgguucugaagg

SEQ ID NO: 4814 - RNA, 18 nt, Artificial Sequence
  Antisense oligonucleotide
  misc_feature (1)..(1): BNA scaffold modification
  misc_feature (4)..(4): BNA scaffold modification
  misc_feature (14)..(14): BNA scaffold modification
  misc_feature (18)..(18): BNA scaffold modification
tgccuccgguucugaagg

SEQ ID NO: 4815 - RNA, 18 nt, Artificial Sequence
  Antisense oligonucleotide
  misc_feature (1)..(2): BNA scaffold modification
  misc_feature (17)..(18): BNA scaffold modification
tgccuccgguucugaagg

SEQ ID NO: 4816 - RNA, 18 nt, Artificial Sequence
  Antisense oligonucleotide
  misc_feature (1)..(2): BNA scaffold modification
  misc_feature (14)..(14): BNA scaffold modification
  misc_feature (17)..(18): BNA scaffold modification
tgccuccgguucugaagg

SEQ ID NO: 4817 - RNA, 18 nt, Artificial Sequence
  Antisense oligonucleotide
  misc_feature (1)..(2): BNA scaffold modification
  misc_feature (12)..(12): BNA scaffold modification
  misc_feature (17)..(18): BNA scaffold modification
tgccuccgguucugaagg

SEQ ID NO: 4818 - RNA, 18 nt, Artificial Sequence
  Antisense oligonucleotide
  misc_feature (1)..(1): BNA scaffold modification
  misc_feature (8)..(8): BNA scaffold modification
  misc_feature (18)..(18): BNA scaffold modification
gccuccgguucugaaggt

SEQ ID NO: 4819 - RNA, 18 nt, Artificial Sequence
  Antisense oligonucleotide
  misc_feature (1)..(1): BNA scaffold modification
  misc_feature (5)..(5): BNA scaffold modification
  misc_feature (18)..(18): BNA scaffold modification
gccuccgguucugaaggt

SEQ ID NO: 4820 - RNA, 18 nt, Artificial Sequence
  Antisense oligonucleotide
  misc_feature (1)..(1): BNA scaffold modification
  misc_feature (11)..(11): BNA scaffold modification
  misc_feature (18)..(18): BNA scaffold modification
gccuccgguucugaaggt

SEQ ID NO: 4821 - RNA, 18 nt, Artificial Sequence
  Antisense oligonucleotide
  misc_feature (1)..(1): BNA scaffold modification
  misc_feature (13)..(13): BNA scaffold modification
  misc_feature (18)..(18): BNA scaffold modification
gccuccgguucugaaggt

SEQ ID NO: 4822 - RNA, 18 nt, Artificial Sequence
  Antisense oligonucleotide
  misc_feature (1)..(1): BNA scaffold modification
  misc_feature (16)..(16): BNA scaffold modification
  misc_feature (18)..(18): BNA scaffold modification
gccuccgguucugaaggt

SEQ ID NO: 4823 - RNA, 18 nt, Artificial Sequence
  Antisense oligonucleotide
  misc_feature (1)..(1): BNA scaffold modification
  misc_feature (13)..(13): BNA scaffold modification
  misc_feature (16)..(16): BNA scaffold modification
  misc_feature (18)..(18): BNA scaffold modification
gccuccgguucugaaggt

SEQ ID NO: 4824 - RNA, 18 nt, Artificial Sequence
  Antisense oligonucleotide
  misc_feature (1)..(1): BNA scaffold modification
  misc_feature (8)..(8): BNA scaffold modification
  misc_feature (13)..(13): BNA scaffold modification
  misc_feature (18)..(18): BNA scaffold modification
gccuccgguucugaaggt

SEQ ID NO: 4825 - RNA, 18 nt, Artificial Sequence
  Antisense oligonucleotide
  misc_feature (1)..(1): BNA scaffold modification
  misc_feature (11)..(11): BNA scaffold modification
  misc_feature (16)..(16): BNA scaffold modification
  misc_feature (18)..(18): BNA scaffold modification
gccuccgguucugaaggt

SEQ ID NO: 4826 - RNA, 18 nt, Artificial Sequence
  Antisense oligonucleotide
  misc_feature (1)..(1): BNA scaffold modification
  misc_feature (8)..(8): BNA scaffold modification
  misc_feature (13)..(13): BNA scaffold modification
  misc_feature (18)..(18): BNA scaffold modification
gccuccgguucugaaggt

SEQ ID NO: 4827 - RNA, 18 nt, Artificial Sequence
  Antisense oligonucleotide
  misc_feature (1)..(2): BNA scaffold modification
  misc_feature (17)..(18): BNA scaffold modification
gccuccgguucugaaggt

SEQ ID NO: 4828 - RNA, 18 nt, Artificial Sequence
  Antisense oligonucleotide
  misc_feature (1)..(2): BNA scaffold modification
  misc_feature (13)..(13): BNA scaffold modification
  misc_feature (17)..(18): BNA scaffold modification
gccuccgguucugaaggt

SEQ ID NO: 4829 - RNA, 18 nt, Artificial Sequence
  Antisense oligonucleotide
  misc_feature (1)..(2): BNA scaffold modification
  misc_feature (11)..(11): BNA scaffold modification
  misc_feature (13)..(13): BNA scaffold modification
  misc_feature (17)..(18): BNA scaffold modification
gccuccgguucugaaggt

SEQ ID NO: 4830 - RNA, 18 nt, Artificial Sequence
  Antisense oligonucleotide
  misc_feature (1)..(1): BNA scaffold modification
  misc_feature (18)..(18): BNA scaffold modification
ccuccgguucugaaggug

SEQ ID NO: 4831 - RNA, 18 nt, Artificial Sequence
  Antisense oligonucleotide
  misc_feature (1)..(1): BNA scaffold modification
  misc_feature (4)..(4): BNA scaffold modification
  misc_feature (18)..(18): BNA scaffold modification
ccuccgguucugaaggug

SEQ ID NO: 4832 - RNA, 18 nt, Artificial Sequence
  Antisense oligonucleotide
  misc_feature (1)..(1): BNA scaffold modification
  misc_feature (7)..(7): BNA scaffold modification
  misc_feature (18)..(18): BNA scaffold modification
ccuccgguucugaaggug

SEQ ID NO: 4833 - RNA, 18 nt, Artificial Sequence
  Antisense oligonucleotide
  misc_feature (1)..(1): BNA scaffold modification
  misc_feature (10)..(10): BNA scaffold modification
  misc_feature (18)..(18): BNA scaffold modification
ccuccgguucugaaggug

SEQ ID NO: 4834 - RNA, 18 nt, Artificial Sequence
  Antisense oligonucleotide
  misc_feature (1)..(1): BNA scaffold modification
  misc_feature (12)..(12): BNA scaffold modification
  misc_feature (18)..(18): BNA scaffold modification
ccuccgguucugaaggug

SEQ ID NO: 4835 - RNA, 18 nt, Artificial Sequence
  Antisense oligonucleotide
  misc_feature (1)..(1): BNA scaffold modification
  misc_feature (15)..(15): BNA scaffold modification
  misc_feature (18)..(18): BNA scaffold modification
ccuccgguucugaaggug

SEQ ID NO: 4836 - RNA, 18 nt, Artificial Sequence
  Antisense oligonucleotide
  misc_feature (1)..(1): BNA scaffold modification
  misc_feature (10)..(10): BNA scaffold modification
  misc_feature (15)..(15): BNA scaffold modification
  misc_feature (18)..(18): BNA scaffold modification
ccuccgguucugaaggug

SEQ ID NO: 4837 - RNA, 18 nt, Artificial Sequence
  Antisense oligonucleotide
  misc_feature (1)..(1): BNA scaffold modification
  misc_feature (7)..(7): BNA scaffold modification
  misc_feature (12)..(12): BNA scaffold modification
  misc_feature (18)..(18): BNA scaffold modification
ccuccgguucugaaggug

SEQ ID NO: 4838 - RNA, 18 nt, Artificial Sequence
  Antisense oligonucleotide
  misc_feature (1)..(1): BNA scaffold modification
  misc_feature (4)..(4): BNA scaffold modification
  misc_feature (10)..(10): BNA scaffold modification
  misc_feature (18)..(18): BNA scaffold modification
ccuccgguucugaaggug

SEQ ID NO: 4839 - RNA, 18 nt, Artificial Sequence
  Antisense oligonucleotide
  misc_feature (1)..(2): BNA scaffold modification
  misc_feature (17)..(18): BNA scaffold modification
ccuccgguucugaaggtg

SEQ ID NO: 4840 - RNA, 18 nt, Artificial Sequence
  Antisense oligonucleotide
  misc_feature (1)..(2): BNA scaffold modification
  misc_feature (10)..(10): BNA scaffold modification
  misc_feature (17)..(18): BNA scaffold modification
ccuccgguucugaaggtg

SEQ ID NO: 4841 - RNA, 18 nt, Artificial Sequence
  Antisense oligonucleotide
  misc_feature (1)..(2): BNA scaffold modification
  misc_feature (10)..(10): BNA scaffold modification
  misc_feature (12)..(12): BNA scaffold modification
  misc_feature (17)..(18): BNA scaffold modification
ccuccgguucugaaggtg

SEQ ID NO: 4842 - RNA, 18 nt, Artificial Sequence
  Antisense oligonucleotide
  misc_feature (1)..(1): BNA scaffold modification
  misc_feature (18)..(18): BNA scaffold modification
cuccgguucugaaggugt

SEQ ID NO: 4843 - RNA, 18 nt, Artificial Sequence
  Antisense oligonucleotide
  misc_feature (1)..(1): BNA scaffold modification
  misc_feature (6)..(6): BNA scaffold modification
  misc_feature (18)..(18): BNA scaffold modification
cuccgguucugaaggugt

SEQ ID NO: 4844 - RNA, 18 nt, Artificial Sequence
  Antisense oligonucleotide
  misc_feature (1)..(1): BNA scaffold modification
  misc_feature (9)..(9): BNA scaffold modification
  misc_feature (18)..(18): BNA scaffold modification
cuccgguucugaaggugt

SEQ ID NO: 4845 - RNA, 18 nt, Artificial Sequence
  Antisense oligonucleotide
  misc_feature (1)..(1): BNA scaffold modification
  misc_feature (11)..(11): BNA scaffold modification
  misc_feature (18)..(18): BNA scaffold modification
cuccgguucugaaggugt

SEQ ID NO: 4846 - RNA, 18 nt, Artificial Sequence
  Antisense oligonucleotide
  misc_feature (1)..(1): BNA scaffold modification
  misc_feature (15)..(15): BNA scaffold modification
  misc_feature (18)..(18): BNA scaffold modification
cuccgguucugaaggugt

SEQ ID NO: 4847 - RNA, 18 nt, Artificial Sequence
  Antisense oligonucleotide
  misc_feature (1)..(1): BNA scaffold modification
  misc_feature (9)..(9): BNA scaffold modification
  misc_feature (14)..(14): BNA scaffold modification
  misc_feature (18)..(18): BNA scaffold modification
cuccgguucugaaggugt

SEQ ID NO: 4848 - RNA, 18 nt, Artificial Sequence
  Antisense oligonucleotide
  misc_feature (1)..(1): BNA scaffold modification
  misc_feature (6)..(6): BNA scaffold modification
  misc_feature (11)..(11): BNA scaffold modification
  misc_feature (18)..(18): BNA scaffold modification
cuccgguucugaaggugt

SEQ ID NO: 4849 - RNA, 18 nt, Artificial Sequence
  Antisense oligonucleotide
  misc_feature (1)..(1): BNA scaffold modification
  misc_feature (6)..(6): BNA scaffold modification
  misc_feature (11)..(11): BNA scaffold modification
  misc_feature (15)..(15): BNA scaffold modification
  misc_feature (18)..(18): BNA scaffold modification
cuccgguucugaaggugt

SEQ ID NO: 4850 - RNA, 18 nt, Artificial Sequence
  Antisense oligonucleotide
  misc_feature (1)..(2): BNA scaffold modification
  misc_feature (17)..(18): BNA scaffold modification
ctccgguucugaaggugt

SEQ ID NO: 4851 - RNA, 18 nt, Artificial Sequence
  Antisense oligonucleotide
  misc_feature (1)..(2): BNA scaffold modification
  misc_feature (9)..(9): BNA scaffold modification
  misc_feature (17)..(18): BNA scaffold modification
ctccgguucugaaggugt

SEQ ID NO: 4852 - RNA, 18 nt, Artificial Sequence
  Antisense oligonucleotide
  misc_feature (1)..(2): BNA scaffold modification
  misc_feature (11)..(11): BNA scaffold modification
  misc_feature (17)..(18): BNA scaffold modification
ctccgguucugaaggugt

SEQ ID NO: 4853 - RNA, 18 nt, Artificial Sequence
  Antisense oligonucleotide
  misc_feature (1)..(1): BNA scaffold modification
  misc_feature (18)..(18): BNA scaffold modification
tccgguucugaaggugut

SEQ ID NO: 4854 - RNA, 18 nt, Artificial Sequence
  Antisense oligonucleotide
  misc_feature (1)..(1): BNA scaffold modification
  misc_feature (8)..(8): BNA scaffold modification
  misc_feature (18)..(18): BNA scaffold modification
tccgguucugaaggugut

SEQ ID NO: 4855 - RNA, 18 nt, Artificial Sequence
  Antisense oligonucleotide
  misc_feature (1)..(1): BNA scaffold modification
  misc_feature (10)..(10): BNA scaffold modification
  misc_feature (18)..(18): BNA scaffold modification
tccgguucugaaggugut

SEQ ID NO: 4856 - RNA, 18 nt, Artificial Sequence
  Antisense oligonucleotide
  misc_feature (1)..(1): BNA scaffold modification
  misc_feature (13)..(13): BNA scaffold modification
  misc_feature (18)..(18): BNA scaffold modification
tccgguucugaaggugut

SEQ ID NO: 4857 - RNA, 18 nt, Artificial Sequence
  Antisense oligonucleotide
  misc_feature (1)..(1): BNA scaffold modification
  misc_feature (16)..(16): BNA scaffold modification
  misc_feature (18)..(18): BNA scaffold modification
tccgguucugaaggugut

SEQ ID NO: 4858 - RNA, 18 nt, Artificial Sequence
  Antisense oligonucleotide
  misc_feature (1)..(1): BNA scaffold modification
  misc_feature (10)..(10): BNA scaffold modification
  misc_feature (16)..(16): BNA scaffold modification
  misc_feature (18)..(18): BNA scaffold modification
tccgguucugaaggugut

SEQ ID NO: 4859 - RNA, 18 nt, Artificial Sequence
  Antisense oligonucleotide
  misc_feature (1)..(1): BNA scaffold modification
  misc_feature (8)..(8): BNA scaffold modification
  misc_feature (16)..(16): BNA scaffold modification
  misc_feature (18)..(18): BNA scaffold modification
tccgguucugaaggugut

SEQ ID NO: 4860 - RNA, 18 nt, Artificial Sequence
  Antisense oligonucleotide
  misc_feature (1)..(1): BNA scaffold modification
  misc_feature (8)..(8): BNA scaffold modification
  misc_feature (13)..(13): BNA scaffold modification
  misc_feature (16)..(16): BNA scaffold modification
  misc_feature (18)..(18): BNA scaffold modification
tccgguucugaaggugut

SEQ ID NO: 4861 - RNA, 18 nt, Artificial Sequence
  Antisense oligonucleotide
  misc_feature (1)..(2): BNA scaffold modification
  misc_feature (17)..(18): BNA scaffold modification
tccgguucugaaggugtt

SEQ ID NO: 4862 - RNA, 18 nt, Artificial Sequence
  Antisense oligonucleotide
  misc_feature (1)..(2): BNA scaffold modification
  misc_feature (10)..(10): BNA scaffold modification
  misc_feature (17)..(18): BNA scaffold modification
tccgguucugaaggugtt

SEQ ID NO: 4863 - RNA, 18 nt, Artificial Sequence
  Antisense oligonucleotide
  misc_feature (1)..(2): BNA scaffold modification
  misc_feature (8)..(8): BNA scaffold modification
  misc_feature (10)..(10): BNA scaffold modification
  misc_feature (17)..(18): BNA scaffold modification
tccgguucugaaggugtt

SEQ ID NO: 4864 - RNA, 18 nt, Artificial Sequence
  Antisense oligonucleotide
  misc_feature (1)..(1): BNA scaffold modification
  misc_feature (18)..(18): BNA scaffold modification
ccgguucugaagguguuc

SEQ ID NO: 4865 - RNA, 18 nt, Artificial Sequence
  Antisense oligonucleotide
  misc_feature (1)..(1): BNA scaffold modification
  misc_feature (7)..(7): BNA scaffold modification
  misc_feature (18)..(18): BNA scaffold modification
ccgguucugaagguguuc

SEQ ID NO: 4866 - RNA, 18 nt, Artificial Sequence
  Antisense oligonucleotide
  misc_feature (1)..(1): BNA scaffold modification
  misc_feature (9)..(9): BNA scaffold modification
  misc_feature (18)..(18): BNA scaffold modification
ccgguucugaagguguuc

SEQ ID NO: 4867 - RNA, 18 nt, Artificial Sequence
  Antisense oligonucleotide
  misc_feature (1)..(1): BNA scaffold modification
  misc_feature (12)..(12): BNA scaffold modification
  misc_feature (18)..(18): BNA scaffold modification
ccgguucugaagguguuc

SEQ ID NO: 4868 - RNA, 18 nt, Artificial Sequence
  Antisense oligonucleotide
  misc_feature (1)..(1): BNA scaffold modification
  misc_feature (15)..(15): BNA scaffold modification
  misc_feature (18)..(18): BNA scaffold modification
ccgguucugaagguguuc

SEQ ID NO: 4869 - RNA, 18 nt, Artificial Sequence
  Antisense oligonucleotide
  misc_feature (1)..(1): BNA scaffold modification
  misc_feature (9)..(9): BNA scaffold modification
  misc_feature (15)..(15): BNA scaffold modification
  misc_feature (18)..(18): BNA scaffold modification
ccgguucugaagguguuc

SEQ ID NO: 4870 - RNA, 18 nt, Artificial Sequence
  Antisense oligonucleotide
  misc_feature (1)..(1): BNA scaffold modification
  misc_feature (7)..(7): BNA scaffold modification
  misc_feature (12)..(12): BNA scaffold modification
  misc_feature (18)..(18): BNA scaffold modification
ccgguucugaagguguuc

SEQ ID NO: 4871 - RNA, 18 nt, Artificial Sequence
  Antisense oligonucleotide
  misc_feature (1)..(1): BNA scaffold modification
  misc_feature (4)..(4): BNA scaffold modification
  misc_feature (9)..(9): BNA scaffold modification
  misc_feature (15)..(15): BNA scaffold modification
  misc_feature (18)..(18): BNA scaffold modification
ccgguucugaagguguuc

SEQ ID NO: 4872 - RNA, 18 nt, Artificial Sequence
  Antisense oligonucleotide
  misc_feature (1)..(2): BNA scaffold modification
  misc_feature (17)..(18): BNA scaffold modification
ccgguucugaaggugutc

SEQ ID NO: 4873 - RNA, 18 nt, Artificial Sequence
  Antisense oligonucleotide
  misc_feature (1)..(2): BNA scaffold modification
  misc_feature (9)..(9): BNA scaffold modification
  misc_feature (17)..(18): BNA scaffold modification
ccgguucugaaggugutc

SEQ ID NO: 4874 - RNA, 18 nt, Artificial Sequence
  Antisense oligonucleotide
  misc_feature (1)..(2): BNA scaffold modification
  misc_feature (7)..(7): BNA scaffold modification
  misc_feature (15)..(15): BNA scaffold modification
  misc_feature (17)..(18): BNA scaffold modification
ccgguucugaaggugutc

SEQ ID NO: 4875 - RNA, 16 nt, Artificial Sequence
  Antisense oligonucleotide
  misc_feature (1)..(1): BNA scaffold modification
  misc_feature (16)..(16): BNA scaffold modification
guugccuccgguucug

SEQ ID NO: 4876 - RNA, 16 nt, Artificial Sequence
  Antisense oligonucleotide
  misc_feature (1)..(1): BNA scaffold modification
  misc_feature (14)..(14): BNA scaffold modification
  misc_feature (16)..(16): BNA scaffold modification
guugccuccgguucug

SEQ ID NO: 4877 - RNA, 16 nt, Artificial Sequence
  Antisense oligonucleotide
  misc_feature (1)..(1): BNA scaffold modification
  misc_feature (11)..(11): BNA scaffold modification
  misc_feature (16)..(16): BNA scaffold modification
guugccuccgguucug

SEQ ID NO: 4878 - RNA, 16 nt, Artificial Sequence
  Antisense oligonucleotide
  misc_feature (1)..(1): BNA scaffold modification
  misc_feature (8)..(8): BNA scaffold modification
  misc_feature (16)..(16): BNA scaffold modification
guugccuccgguucug

SEQ ID NO: 4879 - RNA, 16 nt, Artificial Sequence
  Antisense oligonucleotide
  misc_feature (1)..(1): BNA scaffold modification
  misc_feature (4)..(4): BNA scaffold modification
  misc_feature (16)..(16): BNA scaffold modification
guugccuccgguucug

SEQ ID NO: 4880 - RNA, 16 nt, Artificial Sequence
  Antisense oligonucleotide
  misc_feature (1)..(1): BNA scaffold modification
  misc_feature (4)..(4): BNA scaffold modification
  misc_feature (14)..(14): BNA scaffold modification
  misc_feature (16)..(16): BNA scaffold modification
guugccuccgguucug

SEQ ID NO: 4881 - RNA, 16 nt, Artificial Sequence
  Antisense oligonucleotide
  misc_feature (1)..(1): BNA scaffold modification
  misc_feature (6)..(6): BNA scaffold modification
  misc_feature (11)..(11): BNA scaffold modification
  misc_feature (16)..(16): BNA scaffold modification
guugccuccgguucug

SEQ ID NO: 4882 - RNA, 16 nt, Artificial Sequence
  Antisense oligonucleotide
  misc_feature (1)..(1): BNA scaffold modification
  misc_feature (8)..(8): BNA scaffold modification
  misc_feature (14)..(14): BNA scaffold modification
  misc_feature (16)..(16): BNA scaffold modification
guugccuccgguucug

SEQ ID NO: 4883 - RNA, 16 nt, Artificial Sequence
  Antisense oligonucleotide
  misc_feature (1)..(2): BNA scaffold modification
  misc_feature (15)..(16): BNA scaffold modification
gtugccuccgguuctg

SEQ ID NO: 4884 - RNA, 16 nt, Artificial Sequence
  Antisense oligonucleotide
  misc_feature (1)..(2): BNA scaffold modification
  misc_feature (6)..(6): BNA scaffold modification
  misc_feature (15)..(16): BNA scaffold modification
gtugccuccgguuctg

SEQ ID NO: 4885 - RNA, 16 nt, Artificial Sequence
  Antisense oligonucleotide
  misc_feature (1)..(2): BNA scaffold modification
  misc_feature (11)..(11): BNA scaffold modification
  misc_feature (15)..(16): BNA scaffold modification
gtugccuccgguuctg

SEQ ID NO: 4886 - RNA, 16 nt, Artificial Sequence
  Antisense oligonucleotide
  misc_feature (1)..(1): BNA scaffold modification
  misc_feature (16)..(16): BNA scaffold modification
tugccuccgguucuga

SEQ ID NO: 4887 - RNA, 16 nt, Artificial Sequence
  Antisense oligonucleotide
  misc_feature (1)..(1): BNA scaffold modification
  misc_feature (13)..(13): BNA scaffold modification
  misc_feature (16)..(16): BNA scaffold modification
tugccuccgguucuga

SEQ ID NO: 4888 - RNA, 16 nt, Artificial Sequence
  Antisense oligonucleotide
  misc_feature (1)..(1): BNA scaffold modification
  misc_feature (10)..(10): BNA scaffold modification
  misc_feature (16)..(16): BNA scaffold modification
tugccuccgguucuga

SEQ ID NO: 4889 - RNA, 16 nt, Artificial Sequence
  Antisense oligonucleotide
  misc_feature (1)..(1): BNA scaffold modification
  misc_feature (5)..(5): BNA scaffold modification
  misc_feature (16)..(16): BNA scaffold modification
tugccuccgguucuga

SEQ ID NO: 4890 - RNA, 16 nt, Artificial Sequence
  Antisense oligonucleotide
  misc_feature (1)..(1): BNA scaffold modification
  misc_feature (3)..(3): BNA scaffold modification
  misc_feature (16)..(16): BNA scaffold modification
tugccuccgguucuga

SEQ ID NO: 4891 - RNA, 16 nt, Artificial Sequence
  Antisense oligonucleotide
  misc_feature (1)..(1): BNA scaffold modification
  misc_feature (5)..(5): BNA scaffold modification
  misc_feature (13)..(13): BNA scaffold modification
  misc_feature (16)..(16): BNA scaffold modification
tugccuccgguucuga

SEQ ID NO: 4892 - RNA, 16 nt, Artificial Sequence
  Antisense oligonucleotide
  misc_feature (1)..(1): BNA scaffold modification
  misc_feature (7)..(7): BNA scaffold modification
  misc_feature (10)..(10): BNA scaffold modification
  misc_feature (16)..(16): BNA scaffold modification
tugccuccgguucuga

SEQ ID NO: 4893 - RNA, 16 nt, Artificial Sequence
  Antisense oligonucleotide
  misc_feature (1)..(1): BNA scaffold modification
  misc_feature (15)..(16): BNA scaffold modification
tugccuccgguucuga

SEQ ID NO: 4894 - RNA, 16 nt, Artificial Sequence
  Antisense oligonucleotide
  misc_feature (1)..(2): BNA scaffold modification
  misc_feature (16)..(16): BNA scaffold modification
ttgccuccgguucuga

SEQ ID NO: 4895 - RNA, 16 nt, Artificial Sequence
  Antisense oligonucleotide
  misc_feature (1)..(2): BNA scaffold modification
  misc_feature (15)..(16): BNA scaffold modification
ttgccuccgguucuga

SEQ ID NO: 4896 - RNA, 16 nt, Artificial Sequence
  Antisense oligonucleotide
  misc_feature (1)..(2): BNA scaffold modification
  misc_feature (7)..(7): BNA scaffold modification
  misc_feature (13)..(13): BNA scaffold modification
  misc_feature (15)..(16): BNA scaffold modification
ttgccuccgguucuga

SEQ ID NO: 4897 - RNA, 16 nt, Artificial Sequence
  Antisense oligonucleotide
  misc_feature (1)..(1): BNA scaffold modification
  misc_feature (16)..(16): BNA scaffold modification
tgccuccgguucugaa

SEQ ID NO: 4898 - RNA, 16 nt, Artificial Sequence
  Antisense oligonucleotide
  misc_feature (1)..(1): BNA scaffold modification
  misc_feature (4)..(4): BNA scaffold modification
  misc_feature (16)..(16): BNA scaffold modification
tgccuccgguucugaa

SEQ ID NO: 4899 - RNA, 16 nt, Artificial Sequence
  Antisense oligonucleotide
  misc_feature (1)..(1): BNA scaffold modification
  misc_feature (9)..(9): BNA scaffold modification
  misc_feature (16)..(16): BNA scaffold modification
tgccuccgguucugaa

SEQ ID NO: 4900 - RNA, 16 nt, Artificial Sequence
  Antisense oligonucleotide
  misc_feature (1)..(1): BNA scaffold modification
  misc_feature (12)..(12): BNA scaffold modification
  misc_feature (16)..(16): BNA scaffold modification
tgccuccgguucugaa

SEQ ID NO: 4901 - RNA, 16 nt, Artificial Sequence
  Antisense oligonucleotide
  misc_feature (1)..(1): BNA scaffold modification
  misc_feature (14)..(14): BNA scaffold modification
  misc_feature (16)..(16): BNA scaffold modification
tgccuccgguucugaa

SEQ ID NO: 4902 - RNA, 16 nt, Artificial Sequence
  Antisense oligonucleotide
  misc_feature (1)..(1): BNA scaffold modification
  misc_feature (12)..(12): BNA scaffold modification
  misc_feature (14)..(14): BNA scaffold modification
  misc_feature (16)..(16): BNA scaffold modification
tgccuccgguucugaa

SEQ ID NO: 4903 - RNA, 16 nt, Artificial Sequence
  Antisense oligonucleotide
  misc_feature (1)..(1): BNA scaffold modification
  misc_feature (9)..(9): BNA scaffold modification
  misc_feature (14)..(14): BNA scaffold modification
  misc_feature (16)..(16): BNA scaffold modification
tgccuccgguucugaa

SEQ ID NO: 4904 - RNA, 16 nt, Artificial Sequence
  Antisense oligonucleotide
  misc_feature (1)..(1): BNA scaffold modification
  misc_feature (4)..(4): BNA scaffold modification
  misc_feature (9)..(9): BNA scaffold modification
  misc_feature (16)..(16): BNA scaffold modification
tgccuccgguucugaa

SEQ ID NO: 4905 - RNA, 16 nt, Artificial Sequence
  Antisense oligonucleotide
  misc_feature (1)..(2): BNA scaffold modification
  misc_feature (15)..(16): BNA scaffold modification
tgccuccgguucugaa

SEQ ID NO: 4906 - RNA, 16 nt, Artificial Sequence
  Antisense oligonucleotide
  misc_feature (1)..(2): BNA scaffold modification
  misc_feature (12)..(12): BNA scaffold modification
  misc_feature (15)..(16): BNA scaffold modification
tgccuccgguucugaa

SEQ ID NO: 4907 - RNA, 16 nt, Artificial Sequence
  Antisense oligonucleotide
  misc_feature (1)..(2): BNA scaffold modification
  misc_feature (14)..(16): BNA scaffold modification
tgccuccgguucugaa

SEQ ID NO: 4908 - RNA, 16 nt, Artificial Sequence
  Antisense oligonucleotide
  misc_feature (1)..(1): BNA scaffold modification
  misc_feature (16)..(16): BNA scaffold modification
gccuccgguucugaag

SEQ ID NO: 4909 - RNA, 16 nt, Artificial Sequence
  Antisense oligonucleotide
  misc_feature (1)..(1): BNA scaffold modification
  misc_feature (11)..(11): BNA scaffold modification
  misc_feature (16)..(16): BNA scaffold modification
gccuccgguucugaag

SEQ ID NO: 4910 - RNA, 16 nt, Artificial Sequence
  Antisense oligonucleotide
  misc_feature (1)..(1): BNA scaffold modification
  misc_feature (13)..(13): BNA scaffold modification
  misc_feature (16)..(16): BNA scaffold modification
gccuccgguucugaag

SEQ ID NO: 4911 - RNA, 16 nt, Artificial Sequence
  Antisense oligonucleotide
  misc_feature (1)..(1): BNA scaffold modification
  misc_feature (8)..(8): BNA scaffold modification
  misc_feature (16)..(16): BNA scaffold modification
gccuccgguucugaag

SEQ ID NO: 4912 - RNA, 16 nt, Artificial Sequence
  Antisense oligonucleotide
  misc_feature (1)..(1): BNA scaffold modification
  misc_feature (3)..(3): BNA scaffold modification
  misc_feature (16)..(16): BNA scaffold modification
gccuccgguucugaag

SEQ ID NO: 4913 - RNA, 16 nt, Artificial Sequence
  Antisense oligonucleotide
  misc_feature (1)..(1): BNA scaffold modification
  misc_feature (3)..(3): BNA scaffold modification
  misc_feature (13)..(13): BNA scaffold modification
  misc_feature (16)..(16): BNA scaffold modification
gccuccgguucugaag

SEQ ID NO: 4914 - RNA, 16 nt, Artificial Sequence
  Antisense oligonucleotide
  misc_feature (1)..(1): BNA scaffold modification
  misc_feature (5)..(5): BNA scaffold modification
  misc_feature (11)..(11): BNA scaffold modification
  misc_feature (16)..(16): BNA scaffold modification
gccuccgguucugaag

SEQ ID NO: 4915 - RNA, 16 nt, Artificial Sequence
  Antisense oligonucleotide
  misc_feature (1)..(1): BNA scaffold modification
  misc_feature (11)..(11): BNA scaffold modification
  misc_feature (13)..(13): BNA scaffold modification
  misc_feature (16)..(16): BNA scaffold modification
gccuccgguucugaag

SEQ ID NO: 4916 - RNA, 16 nt, Artificial Sequence
  Antisense oligonucleotide
  misc_feature (1)..(2): BNA scaffold modification
  misc_feature (15)..(16): BNA scaffold modification
gccuccgguucugaag

SEQ ID NO: 4917 - RNA, 16 nt, Artificial Sequence
  Antisense oligonucleotide
  misc_feature (1)..(2): BNA scaffold modification
  misc_feature (11)..(11): BNA scaffold modification
  misc_feature (15)..(16): BNA scaffold modification
gccuccgguucugaag

SEQ ID NO: 4918 - RNA, 16 nt, Artificial Sequence
  Antisense oligonucleotide
  misc_feature (1)..(2): BNA scaffold modification
  misc_feature (8)..(8): BNA scaffold modification
  misc_feature (11)..(11): BNA scaffold modification
  misc_feature (15)..(16): BNA scaffold modification
gccuccgguucugaag

SEQ ID NO: 4919 - RNA, 16 nt, Artificial Sequence
  Antisense oligonucleotide
  misc_feature (1)..(1): BNA scaffold modification
  misc_feature (16)..(16): BNA scaffold modification
ccuccgguucugaagg

SEQ ID NO: 4920 - RNA, 16 nt, Artificial Sequence
  Antisense oligonucleotide
  misc_feature (1)..(1): BNA scaffold modification
  misc_feature (4)..(4): BNA scaffold modification
  misc_feature (16)..(16): BNA scaffold modification
ccuccgguucugaagg

SEQ ID NO: 4921 - RNA, 16 nt, Artificial Sequence
  Antisense oligonucleotide
  misc_feature (1)..(1): BNA scaffold modification
  misc_feature (7)..(7): BNA scaffold modification
  misc_feature (16)..(16): BNA scaffold modification
ccuccgguucugaagg

SEQ ID NO: 4922 - RNA, 16 nt, Artificial Sequence
  Antisense oligonucleotide
  misc_feature (1)..(1): BNA scaffold modification
  misc_feature (10)..(10): BNA scaffold modification
  misc_feature (16)..(16): BNA scaffold modification
ccuccgguucugaagg

SEQ ID NO: 4923 - RNA, 16 nt, Artificial Sequence
  Antisense oligonucleotide
  misc_feature (1)..(1): BNA scaffold modification
  misc_feature (12)..(12): BNA scaffold modification
  misc_feature (16)..(16): BNA scaffold modification
ccuccgguucugaagg

SEQ ID NO: 4924 - RNA, 16 nt, Artificial Sequence
  Antisense oligonucleotide
  misc_feature (1)..(1): BNA scaffold modification
  misc_feature (10)..(10): BNA scaffold modification
  misc_feature (12)..(12): BNA scaffold modification
  misc_feature (16)..(16): BNA scaffold modification
ccuccgguucugaagg

SEQ ID NO: 4925 - RNA, 16 nt, Artificial Sequence
  Antisense oligonucleotide
  misc_feature (1)..(1): BNA scaffold modification
  misc_feature (7)..(7): BNA scaffold modification
  misc_feature (12)..(12): BNA scaffold modification
  misc_feature (16)..(16): BNA scaffold modification
ccuccgguucugaagg

SEQ ID NO: 4926 - RNA, 16 nt, Artificial Sequence
  Antisense oligonucleotide
  misc_feature (1)..(1): BNA scaffold modification
  misc_feature (4)..(4): BNA scaffold modification
  misc_feature (10)..(10): BNA scaffold modification
  misc_feature (16)..(16): BNA scaffold modification
ccuccgguucugaagg

SEQ ID NO: 4927 - RNA, 16 nt, Artificial Sequence
  Antisense oligonucleotide
  misc_feature (1)..(2): BNA scaffold modification
  misc_feature (15)..(16): BNA scaffold modification
ccuccgguucugaagg

SEQ ID NO: 4928 - RNA, 16 nt, Artificial Sequence
  Antisense oligonucleotide
  misc_feature (1)..(2): BNA scaffold modification
  misc_feature (10)..(10): BNA scaffold modification
  misc_feature (12)..(12): BNA scaffold modification
  misc_feature (15)..(16): BNA scaffold modification
ccuccgguucugaagg

SEQ ID NO: 4929 - RNA, 16 nt, Artificial Sequence
  Antisense oligonucleotide
  misc_feature (1)..(2): BNA scaffold modification
  misc_feature (7)..(7): BNA scaffold modification
  misc_feature (12)..(12): BNA scaffold modification
  misc_feature (15)..(16): BNA scaffold modification
ccuccgguucugaagg

SEQ ID NO: 4930 - RNA, 16 nt, Artificial Sequence
  Antisense oligonucleotide
  misc_feature (1)..(1): BNA scaffold modification
  misc_feature (16)..(16): BNA scaffold modification
cuccgguucugaaggt

SEQ ID NO: 4931 - RNA, 16 nt, Artificial Sequence
  Antisense oligonucleotide
  misc_feature (1)..(1): BNA scaffold modification
  misc_feature (3)..(3): BNA scaffold modification
  misc_feature (16)..(16): BNA scaffold modification
cuccgguucugaaggt

SEQ ID NO: 4932 - RNA, 16 nt, Artificial Sequence
  Antisense oligonucleotide
  misc_feature (1)..(1): BNA scaffold modification
  misc_feature (6)..(6): BNA scaffold modification
  misc_feature (16)..(16): BNA scaffold modification
cuccgguucugaaggt

SEQ ID NO: 4933 - RNA, 16 nt, Artificial Sequence
  Antisense oligonucleotide
  misc_feature (1)..(1): BNA scaffold modification
  misc_feature (9)..(9): BNA scaffold modification
  misc_feature (16)..(16): BNA scaffold modification
cuccgguucugaaggt

SEQ ID NO: 4934 - RNA, 16 nt, Artificial Sequence
  Antisense oligonucleotide
  misc_feature (1)..(1): BNA scaffold modification
  misc_feature (11)..(11): BNA scaffold modification
  misc_feature (16)..(16): BNA scaffold modification
cuccgguucugaaggt

SEQ ID NO: 4935 - RNA, 16 nt, Artificial Sequence
  Antisense oligonucleotide
  misc_feature (1)..(1): BNA scaffold modification
  misc_feature (14)..(14): BNA scaffold modification
  misc_feature (16)..(16): BNA scaffold modification
cuccgguucugaaggt

SEQ ID NO: 4936 - RNA, 16 nt, Artificial Sequence
  Antisense oligonucleotide
  misc_feature (1)..(1): BNA scaffold modification
  misc_feature (15)..(16): BNA scaffold modification
cuccgguucugaaggt

SEQ ID NO: 4937 - RNA, 16 nt, Artificial Sequence
  Antisense oligonucleotide
  misc_feature (1)..(1): BNA scaffold modification
  misc_feature (11)..(11): BNA scaffold modification
  misc_feature (15)..(16): BNA scaffold modification
cuccgguucugaaggt

SEQ ID NO: 4938 - RNA, 16 nt, Artificial Sequence
  Antisense oligonucleotide
  misc_feature (1)..(1): BNA scaffold modification
  misc_feature (3)..(3): BNA scaffold modification
  misc_feature (9)..(9): BNA scaffold modification
  misc_feature (16)..(16): BNA scaffold modification
cuccgguucugaaggt

SEQ ID NO: 4939 - RNA, 16 nt, Artificial Sequence
  Antisense oligonucleotide
  misc_feature (1)..(1): BNA scaffold modification
  misc_feature (6)..(6): BNA scaffold modification
  misc_feature (11)..(11): BNA scaffold modification
  misc_feature (16)..(16): BNA scaffold modification
cuccgguucugaaggt

SEQ ID NO: 4940 - RNA, 16 nt, Artificial Sequence
  Antisense oligonucleotide
  misc_feature (1)..(2): BNA scaffold modification
  misc_feature (15)..(16): BNA scaffold modification
ctccgguucugaaggt

SEQ ID NO: 4941 - RNA, 16 nt, Artificial Sequence
  Antisense oligonucleotide
  misc_feature (1)..(2): BNA scaffold modification
  misc_feature (9)..(9): BNA scaffold modification
  misc_feature (15)..(16): BNA scaffold modification
ctccgguucugaaggt

SEQ ID NO: 4942 - RNA, 16 nt, Artificial Sequence
  Antisense oligonucleotide
  misc_feature (1)..(2): BNA scaffold modification
  misc_feature (11)..(11): BNA scaffold modification
  misc_feature (15)..(16): BNA scaffold modification
ctccgguucugaaggt

SEQ ID NO: 4943 - RNA, 16 nt, Artificial Sequence
  Antisense oligonucleotide
  misc_feature (1)..(1): BNA scaffold modification
  misc_feature (16)..(16): BNA scaffold modification
tccgguucugaaggug

SEQ ID NO: 4944 - RNA, 16 nt, Artificial Sequence
  Antisense oligonucleotide
  misc_feature (1)..(1): BNA scaffold modification
  misc_feature (5)..(5): BNA scaffold modification
  misc_feature (16)..(16): BNA scaffold modification
tccgguucugaaggug

SEQ ID NO: 4945 - RNA, 16 nt, Artificial Sequence
  Antisense oligonucleotide
  misc_feature (1)..(1): BNA scaffold modification
  misc_feature (8)..(8): BNA scaffold modification
  misc_feature (16)..(16): BNA scaffold modification
tccgguucugaaggug

SEQ ID NO: 4946 - RNA, 16 nt, Artificial Sequence
  Antisense oligonucleotide
  misc_feature (1)..(1): BNA scaffold modification
  misc_feature (10)..(10): BNA scaffold modification
  misc_feature (16)..(16): BNA scaffold modification
tccgguucugaaggug

SEQ ID NO: 4947 - RNA, 16 nt, Artificial Sequence
  Antisense oligonucleotide
  misc_feature (1)..(1): BNA scaffold modification
  misc_feature (13)..(13): BNA scaffold modification
  misc_feature (16)..(16): BNA scaffold modification
tccgguucugaaggug

SEQ ID NO: 4948 - RNA, 16 nt, Artificial Sequence
  Antisense oligonucleotide
  misc_feature (1)..(1): BNA scaffold modification
  misc_feature (14)..(14): BNA scaffold modification
  misc_feature (16)..(16): BNA scaffold modification
tccgguucugaaggug

SEQ ID NO: 4949 - RNA, 16 nt, Artificial Sequence
  Antisense oligonucleotide
  misc_feature (1)..(1): BNA scaffold modification
  misc_feature (8)..(8): BNA scaffold modification
  misc_feature (10)..(10): BNA scaffold modification
  misc_feature (16)..(16): BNA scaffold modification
tccgguucugaaggug

SEQ ID NO: 4950 - RNA, 16 nt, Artificial Sequence
  Antisense oligonucleotide
  misc_feature (1)..(1): BNA scaffold modification
  misc_feature (5)..(5): BNA scaffold modification
  misc_feature (13)..(13): BNA scaffold modification
  misc_feature (16)..(16): BNA scaffold modification
tccgguucugaaggug

SEQ ID NO: 4951 - RNA, 16 nt, Artificial Sequence
  Antisense oligonucleotide
  misc_feature (1)..(2): BNA scaffold modification
  misc_feature (15)..(16): BNA scaffold modification
tccgguucugaaggtg

SEQ ID NO: 4952 - RNA, 16 nt, Artificial Sequence
  Antisense oligonucleotide
  misc_feature (1)..(2): BNA scaffold modification
  misc_feature (8)..(8): BNA scaffold modification
  misc_feature (15)..(16): BNA scaffold modification
tccgguucugaaggtg

SEQ ID NO: 4953 - RNA, 16 nt, Artificial Sequence
  Antisense oligonucleotide
  misc_feature (1)..(2): BNA scaffold modification
  misc_feature (8)..(8): BNA scaffold modification
  misc_feature (10)..(10): BNA scaffold modification
  misc_feature (15)..(16): BNA scaffold modification
tccgguucugaaggtg

SEQ ID NO: 4954 - RNA, 16 nt, Artificial Sequence
  Antisense oligonucleotide
  misc_feature (1)..(1): BNA scaffold modification
  misc_feature (16)..(16): BNA scaffold modification
ccgguucugaaggugt

SEQ ID NO: 4955 - RNA, 16 nt, Artificial Sequence
  Antisense oligonucleotide
  misc_feature (1)..(1): BNA scaffold modification
  misc_feature (4)..(4): BNA scaffold modification
  misc_feature (16)..(16): BNA scaffold modification
ccgguucugaaggugt

SEQ ID NO: 4956 - RNA, 16 nt, Artificial Sequence
  Antisense oligonucleotide
  misc_feature (1)..(1): BNA scaffold modification
  misc_feature (7)..(7): BNA scaffold modification
  misc_feature (16)..(16): BNA scaffold modification
ccgguucugaaggugt

SEQ ID NO: 4957 - RNA, 16 nt, Artificial Sequence
  Antisense oligonucleotide
  misc_feature (1)..(1): BNA scaffold modification
  misc_feature (9)..(9): BNA scaffold modification
  misc_feature (16)..(16): BNA scaffold modification
ccgguucugaaggugt

SEQ ID NO: 4958 - RNA, 16 nt, Artificial Sequence
  Antisense oligonucleotide
  misc_feature (1)..(1): BNA scaffold modification
  misc_feature (12)..(12): BNA scaffold modification
  misc_feature (16)..(16): BNA scaffold modification
ccgguucugaaggugt

SEQ ID NO: 4959 - RNA, 16 nt, Artificial Sequence
  Antisense oligonucleotide
  misc_feature (1)..(1): BNA scaffold modification
  misc_feature (13)..(13): BNA scaffold modification
  misc_feature (16)..(16): BNA scaffold modification
ccgguucugaaggugt

SEQ ID NO: 4960 - RNA, 16 nt, Artificial Sequence
  Antisense oligonucleotide
  misc_feature (1)..(1): BNA scaffold modification
  misc_feature (7)..(7): BNA scaffold modification
  misc_feature (9)..(9): BNA scaffold modification
  misc_feature (16)..(16): BNA scaffold modification
ccgguucugaaggugt

SEQ ID NO: 4961 - RNA, 16 nt, Artificial Sequence
  Antisense oligonucleotide
  misc_feature (1)..(1): BNA scaffold modification
  misc_feature (4)..(4): BNA scaffold modification
  misc_feature (12)..(12): BNA scaffold modification
  misc_feature (16)..(16): BNA scaffold modification
ccgguucugaaggugt

SEQ ID NO: 4962 - RNA, 16 nt, Artificial Sequence
  Antisense oligonucleotide
  misc_feature (1)..(2): BNA scaffold modification
  misc_feature (15)..(16): BNA scaffold modification
ccgguucugaaggugt

SEQ ID NO: 4963 - RNA, 16 nt, Artificial Sequence
  Antisense oligonucleotide
  misc_feature (1)..(2): BNA scaffold modification
  misc_feature (9)..(9): BNA scaffold modification
  misc_feature (15)..(16): BNA scaffold modification
ccgguucugaaggugt

SEQ ID NO: 4964 - RNA, 16 nt, Artificial Sequence
  Antisense oligonucleotide
  misc_feature (1)..(2): BNA scaffold modification
  misc_feature (7)..(7): BNA scaffold modification
  misc_feature (9)..(9): BNA scaffold modification
  misc_feature (15)..(16): BNA scaffold modification
ccgguucugaaggugt

SEQ ID NO: 4965 - RNA, 16 nt, Artificial Sequence
  Antisense oligonucleotide
  misc_feature (1)..(1): BNA scaffold modification
  misc_feature (16)..(16): BNA scaffold modification
cgguucugaaggugut

SEQ ID NO: 4966 - RNA, 16 nt, Artificial Sequence
  Antisense oligonucleotide
  misc_feature (1)..(1): BNA scaffold modification
  misc_feature (8)..(8): BNA scaffold modification
  misc_feature (16)..(16): BNA scaffold modification
cgguucugaaggugut

SEQ ID NO: 4967 - RNA, 16 nt, Artificial Sequence
  Antisense oligonucleotide
  misc_feature (1)..(1): BNA scaffold modification
  misc_feature (6)..(6): BNA scaffold modification
  misc_feature (16)..(16): BNA scaffold modification
cgguucugaaggugut

SEQ ID NO: 4968 - RNA, 16 nt, Artificial Sequence
  Antisense oligonucleotide
  misc_feature (1)..(1): BNA scaffold modification
  misc_feature (11)..(11): BNA scaffold modification
  misc_feature (16)..(16): BNA scaffold modification
cgguucugaaggugut

SEQ ID NO: 4969 - RNA, 16 nt, Artificial Sequence
  Antisense oligonucleotide
  misc_feature (1)..(1): BNA scaffold modification
  misc_feature (14)..(14): BNA scaffold modification
  misc_feature (16)..(16): BNA scaffold modification
cgguucugaaggugut

SEQ ID NO: 4970 - RNA, 16 nt, Artificial Sequence
  Antisense oligonucleotide
  misc_feature (1)..(1): BNA scaffold modification
  misc_feature (6)..(6): BNA scaffold modification
  misc_feature (14)..(14): BNA scaffold modification
  misc_feature (16)..(16): BNA scaffold modification
cgguucugaaggugut

SEQ ID NO: 4971 - RNA, 16 nt, Artificial Sequence
  Antisense oligonucleotide
  misc_feature (1)..(1): BNA scaffold modification
  misc_feature (8)..(8): BNA scaffold modification
  misc_feature (14)..(14): BNA scaffold modification
  misc_feature (16)..(16): BNA scaffold modification
cgguucugaaggugut

SEQ ID NO: 4972 - RNA, 16 nt, Artificial Sequence
  Antisense oligonucleotide
  misc_feature (1)..(1): BNA scaffold modification
  misc_feature (6)..(6): BNA scaffold modification
  misc_feature (11)..(11): BNA scaffold modification
  misc_feature (16)..(16): BNA scaffold modification
cgguucugaaggugut

SEQ ID NO: 4973 - RNA, 16 nt, Artificial Sequence
  Antisense oligonucleotide
  misc_feature (1)..(2): BNA scaffold modification
  misc_feature (15)..(16): BNA scaffold modification
cgguucugaaggugtt

SEQ ID NO: 4974 - RNA, 16 nt, Artificial Sequence
  Antisense oligonucleotide
  misc_feature (1)..(2): BNA scaffold modification
  misc_feature (8)..(8): BNA scaffold modification
  misc_feature (15)..(16): BNA scaffold modification
cgguucugaaggugtt

SEQ ID NO: 4975 - RNA, 16 nt, Artificial Sequence
  Antisense oligonucleotide
  misc_feature (1)..(2): BNA scaffold modification
  misc_feature (6)..(6): BNA scaffold modification
  misc_feature (15)..(16): BNA scaffold modification
cgguucugaaggugtt

SEQ ID NO: 4976 - RNA, 16 nt, Artificial Sequence
  Antisense oligonucleotide
  misc_feature (1)..(1): BNA scaffold modification
  misc_feature (16)..(16): BNA scaffold modification
gguucugaagguguuc

SEQ ID NO: 4977 - RNA, 16 nt, Artificial Sequence
  Antisense oligonucleotide
  misc_feature (1)..(1): BNA scaffold modification
  misc_feature (5)..(5): BNA scaffold modification
  misc_feature (16)..(16): BNA scaffold modification
gguucugaagguguuc

SEQ ID NO: 4978 - RNA, 16 nt, Artificial Sequence
  Antisense oligonucleotide
  misc_feature (1)..(1): BNA scaffold modification
  misc_feature (7)..(7): BNA scaffold modification
  misc_feature (16)..(16): BNA scaffold modification
gguucugaagguguuc

SEQ ID NO: 4979 - RNA, 16 nt, Artificial Sequence
  Antisense oligonucleotide
  misc_feature (1)..(1): BNA scaffold modification
  misc_feature (11)..(11): BNA scaffold modification
  misc_feature (16)..(16): BNA scaffold modification
gguucugaagguguuc

SEQ ID NO: 4980 - RNA, 16 nt, Artificial Sequence
  Antisense oligonucleotide
  misc_feature (1)..(1): BNA scaffold modification
  misc_feature (13)..(13): BNA scaffold modification
  misc_feature (16)..(16): BNA scaffold modification
gguucugaagguguuc

SEQ ID NO: 4981 - RNA, 16 nt, Artificial Sequence
  Antisense oligonucleotide
  misc_feature (1)..(1): BNA scaffold modification
  misc_feature (7)..(7): BNA scaffold modification
  misc_feature (13)..(13): BNA scaffold modification
  misc_feature (16)..(16): BNA scaffold modification
gguucugaagguguuc

SEQ ID NO: 4982 - RNA, 16 nt, Artificial Sequence
  Antisense oligonucleotide
  misc_feature (1)..(1): BNA scaffold modification
  misc_feature (5)..(5): BNA scaffold modification
  misc_feature (13)..(13): BNA scaffold modification
  misc_feature (16)..(16): BNA scaffold modification
gguucugaagguguuc

SEQ ID NO: 4983 - RNA, 16 nt, Artificial Sequence
  Antisense oligonucleotide
  misc_feature (1)..(1): BNA scaffold modification
  misc_feature (5)..(5): BNA scaffold modification
  misc_feature (7)..(7): BNA scaffold modification
  misc_feature (13)..(13): BNA scaffold modification
  misc_feature (16)..(16): BNA scaffold modification
gguucugaagguguuc

SEQ ID NO: 4984 - RNA, 16 nt, Artificial Sequence
  Antisense oligonucleotide
  misc_feature (1)..(2): BNA scaffold modification
  misc_feature (15)..(16): BNA scaffold modification
gguucugaaggugutc

SEQ ID NO: 4985 - RNA, 16 nt, Artificial Sequence
  Antisense oligonucleotide
  misc_feature (1)..(2): BNA scaffold modification
  misc_feature (7)..(7): BNA scaffold modification
  misc_feature (15)..(16): BNA scaffold modification
gguucugaaggugutc

SEQ ID NO: 4986 - RNA, 16 nt, Artificial Sequence
  Antisense oligonucleotide
  misc_feature (1)..(2): BNA scaffold modification
  misc_feature (13)..(13): BNA scaffold modification
  misc_feature (15)..(16): BNA scaffold modification
gguucugaaggugutc

SEQ ID NO: 4987 - RNA, 22 nt, Artificial Sequence
  Antisense oligonucleotide
  misc_feature (1)..(1): BNA scaffold modification
  misc_feature (22)..(22): BNA scaffold modification
cccacugauucugaauucuuuc

SEQ ID NO: 4988 - RNA, 22 nt, Artificial Sequence
  Antisense oligonucleotide
  misc_feature (1)..(1): BNA scaffold modification
  misc_feature (5)..(5): BNA scaffold modification
  misc_feature (22)..(22): BNA scaffold modification
cccacugauucugaauucuuuc

SEQ ID NO: 4989 - RNA, 22 nt, Artificial Sequence
  Antisense oligonucleotide
  misc_feature (1)..(1): BNA scaffold modification
  misc_feature (7)..(7): BNA scaffold modification
  misc_feature (22)..(22): BNA scaffold modification
cccacugauucugaauucuuuc

SEQ ID NO: 4990 - RNA, 22 nt, Artificial Sequence
  Antisense oligonucleotide
  misc_feature (1)..(1): BNA scaffold modification
  misc_feature (11)..(11): BNA scaffold modification
  misc_feature (22)..(22): BNA scaffold modification
cccacugauucugaauucuuuc

SEQ ID NO: 4991 - RNA, 22 nt, Artificial Sequence
  Antisense oligonucleotide
  misc_feature (1)..(1): BNA scaffold modification
  misc_feature (13)..(13): BNA scaffold modification
  misc_feature (22)..(22): BNA scaffold modification
cccacugauucugaauucuuuc

SEQ ID NO: 4992 - RNA, 22 nt, Artificial Sequence
  Antisense oligonucleotide
  misc_feature (1)..(1): BNA scaffold modification
  misc_feature (18)..(18): BNA scaffold modification
  misc_feature (22)..(22): BNA scaffold modification
cccacugauucugaauucuuuc

SEQ ID NO: 4993 - RNA, 22 nt, Artificial Sequence
  Antisense oligonucleotide
  misc_feature (1)..(1): BNA scaffold modification
  misc_feature (13)..(13): BNA scaffold modification
  misc_feature (18)..(18): BNA scaffold modification
  misc_feature (22)..(22): BNA scaffold modification
cccacugauucugaauucuuuc

SEQ ID NO: 4994 - RNA, 22 nt, Artificial Sequence
  Antisense oligonucleotide
  misc_feature (1)..(1): BNA scaffold modification
  misc_feature (11)..(11): BNA scaffold modification
  misc_feature (18)..(18): BNA scaffold modification
  misc_feature (22)..(22): BNA scaffold modification
cccacugauucugaauucuuuc

SEQ ID NO: 4995 - RNA, 22 nt, Artificial Sequence
  Antisense oligonucleotide
  misc_feature (1)..(1): BNA scaffold modification
  misc_feature (7)..(7): BNA scaffold modification
  misc_feature (13)..(13): BNA scaffold modification
  misc_feature (22)..(22): BNA scaffold modification
cccacugauucugaauucuuuc

SEQ ID NO: 4996 - RNA, 22 nt, Artificial Sequence
  Antisense oligonucleotide
  misc_feature (1)..(1): BNA scaffold modification
  misc_feature (5)..(5): BNA scaffold modification
  misc_feature (18)..(18): BNA scaffold modification
  misc_feature (22)..(22): BNA scaffold modification
cccacugauucugaauucuuuc

SEQ ID NO: 4997 - RNA, 22 nt, Artificial Sequence
  Antisense oligonucleotide
  misc_feature (1)..(1): BNA scaffold modification
  misc_feature (5)..(5): BNA scaffold modification
  misc_feature (11)..(11): BNA scaffold modification
  misc_feature (18)..(18): BNA scaffold modification
  misc_feature (22)..(22): BNA scaffold modification
cccacugauucugaauucuuuc

SEQ ID NO: 4998 - RNA, 22 nt, Artificial Sequence
  Antisense oligonucleotide
  misc_feature (1)..(2): BNA scaffold modification
  misc_feature (21)..(22): BNA scaffold modification
cccacugauucugaauucuutc

SEQ ID NO: 4999 - RNA, 22 nt, Artificial Sequence
  Antisense oligonucleotide
  misc_feature (1)..(2): BNA scaffold modification
  misc_feature (7)..(7): BNA scaffold modification
  misc_feature (21)..(22): BNA scaffold modification
cccacugauucugaauucuutc

SEQ ID NO: 5000 - RNA, 22 nt, Artificial Sequence
  Antisense oligonucleotide
  misc_feature (1)..(2): BNA scaffold modification
  misc_feature (7)..(7): BNA scaffold modification
  misc_feature (13)..(13): BNA scaffold modification
  misc_feature (21)..(22): BNA scaffold modification
cccacugauucugaauucuutc

SEQ ID NO: 5001 - RNA, 22 nt, Artificial Sequence
  Antisense oligonucleotide
  misc_feature (1)..(2): BNA scaffold modification
  misc_feature (11)..(11): BNA scaffold modification
  misc_feature (18)..(18): BNA scaffold modification
  misc_feature (21)..(22): BNA scaffold modification
cccacugauucugaauucuutc

SEQ ID NO: 5002 - RNA, 22 nt, Artificial Sequence
  Antisense oligonucleotide
  misc_feature (1)..(2): BNA scaffold modification
  misc_feature (5)..(5): BNA scaffold modification
  misc_feature (21)..(22): BNA scaffold modification
cccacugauucugaauucuutc

SEQ ID NO: 5003 - RNA, 20 nt, Artificial Sequence
  Antisense oligonucleotide
  misc_feature (1)..(1): BNA scaffold modification
  misc_feature (20)..(20): BNA scaffold modification
cccacugauucugaauucut

SEQ ID NO: 5004 - RNA, 20 nt, Artificial Sequence
  Antisense oligonucleotide
  misc_feature (1)..(1): BNA scaffold modification
  misc_feature (5)..(5): BNA scaffold modification
  misc_feature (20)..(20): BNA scaffold modification
cccacugauucugaauucut

SEQ ID NO: 5005 - RNA, 20 nt, Artificial Sequence
  Antisense oligonucleotide
  misc_feature (1)..(1): BNA scaffold modification
  misc_feature (7)..(7): BNA scaffold modification
  misc_feature (20)..(20): BNA scaffold modification
cccacugauucugaauucut

SEQ ID NO: 5006 - RNA, 20 nt, Artificial Sequence
  Antisense oligonucleotide
  misc_feature (1)..(1): BNA scaffold modification
  misc_feature (11)..(11): BNA scaffold modification
  misc_feature (20)..(20): BNA scaffold modification
cccacugauucugaauucut

SEQ ID NO: 5007 - RNA, 20 nt, Artificial Sequence
  Antisense oligonucleotide
  misc_feature (1)..(1): BNA scaffold modification
  misc_feature (13)..(13): BNA scaffold modification
  misc_feature (20)..(20): BNA scaffold modification
cccacugauucugaauucut

SEQ ID NO: 5008 - RNA, 20 nt, Artificial Sequence
  Antisense oligonucleotide
  misc_feature (1)..(1): BNA scaffold modification
  misc_feature (18)..(18): BNA scaffold modification
  misc_feature (20)..(20): BNA scaffold modification
cccacugauucugaauucut

SEQ ID NO: 5009 - RNA, 20 nt, Artificial Sequence
  Antisense oligonucleotide
  misc_feature (1)..(1): BNA scaffold modification
  misc_feature (11)..(11): BNA scaffold modification
  misc_feature (18)..(18): BNA scaffold modification
  misc_feature (20)..(20): BNA scaffold modification
cccacugauucugaauucut

SEQ ID NO: 5010 - RNA, 20 nt, Artificial Sequence
  Antisense oligonucleotide
  misc_feature (1)..(1): BNA scaffold modification
  misc_feature (7)..(7): BNA scaffold modification
  misc_feature (13)..(13): BNA scaffold modification
  misc_feature (20)..(20): BNA scaffold modification
cccacugauucugaauucut

SEQ ID NO: 5011 - RNA, 20 nt, Artificial Sequence
  Antisense oligonucleotide
  misc_feature (1)..(1): BNA scaffold modification
  misc_feature (5)..(5): BNA scaffold modification
  misc_feature (11)..(11): BNA scaffold modification
  misc_feature (20)..(20): BNA scaffold modification
cccacugauucugaauucut

SEQ ID NO: 5012 - RNA, 20 nt, Artificial Sequence
  Antisense oligonucleotide
  misc_feature (1)..(1): BNA scaffold modification
  misc_feature (5)..(5): BNA scaffold modification
  misc_feature (18)..(18): BNA scaffold modification
  misc_feature (20)..(20): BNA scaffold modification
cccacugauucugaauucut

SEQ ID NO: 5013 - RNA, 20 nt, Artificial Sequence
  Antisense oligonucleotide
  misc_feature (1)..(2): BNA scaffold modification
  misc_feature (19)..(20): BNA scaffold modification
cccacugauucugaauuctt

SEQ ID NO: 5014 - RNA, 20 nt, Artificial Sequence
  Antisense oligonucleotide
  misc_feature (1)..(2): BNA scaffold modification
  misc_feature (7)..(7): BNA scaffold modification
  misc_feature (19)..(20): BNA scaffold modification
cccacugauucugaauuctt

SEQ ID NO: 5015 - RNA, 20 nt, Artificial Sequence
  Antisense oligonucleotide
  misc_feature (1)..(1): BNA scaffold modification
  misc_feature (7)..(7): BNA scaffold modification
  misc_feature (13)..(13): BNA scaffold modification
  misc_feature (19)..(20): BNA scaffold modification
cccacugauucugaauuctt

SEQ ID NO: 5016 - RNA, 20 nt, Artificial Sequence
  Antisense oligonucleotide
  misc_feature (1)..(1): BNA scaffold modification
  misc_feature (20)..(20): BNA scaffold modification
ccacugauucugaauucuut

SEQ ID NO: 5017 - RNA, 20 nt, Artificial Sequence
  Antisense oligonucleotide
  misc_feature (1)..(1): BNA scaffold modification
  misc_feature (4)..(4): BNA scaffold modification
  misc_feature (20)..(20): BNA scaffold modification
ccacugauucugaauucuut

SEQ ID NO: 5018 - RNA, 20 nt, Artificial Sequence
  Antisense oligonucleotide
  misc_feature (1)..(1): BNA scaffold modification
  misc_feature (6)..(6): BNA scaffold modification
  misc_feature (20)..(20): BNA scaffold modification
ccacugauucugaauucuut

SEQ ID NO: 5019 - RNA, 20 nt, Artificial Sequence
  Antisense oligonucleotide
  misc_feature (1)..(1): BNA scaffold modification
  misc_feature (10)..(10): BNA scaffold modification
  misc_feature (20)..(20): BNA scaffold modification
ccacugauucugaauucuut

SEQ ID NO: 5020 - RNA, 20 nt, Artificial Sequence
  Antisense oligonucleotide
  misc_feature (1)..(1): BNA scaffold modification
  misc_feature (12)..(12): BNA scaffold modification
  misc_feature (20)..(20): BNA scaffold modification
ccacugauucugaauucuut

SEQ ID NO: 5021 - RNA, 20 nt, Artificial Sequence
  Antisense oligonucleotide
  misc_feature (1)..(1): BNA scaffold modification
  misc_feature (17)..(17): BNA scaffold modification
  misc_feature (20)..(20): BNA scaffold modification
ccacugauucugaauucuut

SEQ ID NO: 5022 - RNA, 20 nt, Artificial Sequence
  Antisense oligonucleotide
  misc_feature (1)..(1): BNA scaffold modification
  misc_feature (10)..(10): BNA scaffold modification
  misc_feature (17)..(17): BNA scaffold modification
  misc_feature (20)..(20): BNA scaffold modification
ccacugauucugaauucuut

SEQ ID NO: 5023 - RNA, 20 nt, Artificial Sequence
  Antisense oligonucleotide
  misc_feature (1)..(1): BNA scaffold modification
  misc_feature (4)..(4): BNA scaffold modification
  misc_feature (17)..(17): BNA scaffold modification
  misc_feature (20)..(20): BNA scaffold modification
ccacugauucugaauucuut

SEQ ID NO: 5024 - RNA, 20 nt, Artificial Sequence
  Antisense oligonucleotide
  misc_feature (1)..(1): BNA scaffold modification
  misc_feature (4)..(4): BNA scaffold modification
  misc_feature (10)..(10): BNA scaffold modification
  misc_feature (20)..(20): BNA scaffold modification
ccacugauucugaauucuut

SEQ ID NO: 5025 - RNA, 20 nt, Artificial Sequence
  Antisense oligonucleotide
  misc_feature (1)..(1): BNA scaffold modification
  misc_feature (6)..(6): BNA scaffold modification
  misc_feature (12)..(12): BNA scaffold modification
  misc_feature (20)..(20): BNA scaffold modification
ccacugauucugaauucuut

SEQ ID NO: 5026 - RNA, 20 nt, Artificial Sequence
  Antisense oligonucleotide
  misc_feature (1)..(1): BNA scaffold modification
  misc_feature (6)..(6): BNA scaffold modification
  misc_feature (10)..(10): BNA scaffold modification
  misc_feature (19)..(20): BNA scaffold modification
ccacugauucugaauucutt

SEQ ID NO: 5027 - RNA, 20 nt, Artificial Sequence
  Antisense oligonucleotide
  misc_feature (1)..(2): BNA scaffold modification
  misc_feature (19)..(20): BNA scaffold modification
ccacugauucugaauucutt

SEQ ID NO: 5028 - RNA, 20 nt, Artificial Sequence
  Antisense oligonucleotide
  misc_feature (1)..(2): BNA scaffold modification
  misc_feature (6)..(6): BNA scaffold modification
  misc_feature (12)..(12): BNA scaffold modification
  misc_feature (19)..(20): BNA scaffold modification
ccacugauucugaauucutt

SEQ ID NO: 5029 - RNA, 20 nt, Artificial Sequence
  Antisense oligonucleotide
  misc_feature (1)..(2): BNA scaffold modification
  misc_feature (10)..(10): BNA scaffold modification
  misc_feature (19)..(20): BNA scaffold modification
ccacugauucugaauucutt

SEQ ID NO: 5030 - RNA, 20 nt, Artificial Sequence
  Antisense oligonucleotide
  misc_feature (1)..(2): BNA scaffold modification
  misc_feature (10)..(10): BNA scaffold modification
  misc_feature (17)..(17): BNA scaffold modification
  misc_feature (19)..(20): BNA scaffold modification
ccacugauucugaauucutt

SEQ ID NO: 5031 - RNA, 20 nt, Artificial Sequence
  Antisense oligonucleotide
  misc_feature (1)..(1): BNA scaffold modification
  misc_feature (20)..(20): BNA scaffold modification
cacugauucugaauucuuuc

SEQ ID NO: 5032 - RNA, 20 nt, Artificial Sequence
  Antisense oligonucleotide
  misc_feature (1)..(1): BNA scaffold modification
  misc_feature (3)..(3): BNA scaffold modification
  misc_feature (20)..(20): BNA scaffold modification
cacugauucugaauucuuuc

SEQ ID NO: 5033 - RNA, 20 nt, Artificial Sequence
  Antisense oligonucleotide
  misc_feature (1)..(1): BNA scaffold modification
  misc_feature (5)..(5): BNA scaffold modification
  misc_feature (20)..(20): BNA scaffold modification
cacugauucugaauucuuuc

SEQ ID NO: 5034 - RNA, 20 nt, Artificial Sequence
  Antisense oligonucleotide
  misc_feature (1)..(1): BNA scaffold modification
  misc_feature (9)..(9): BNA scaffold modification
  misc_feature (20)..(20): BNA scaffold modification
cacugauucugaauucuuuc

SEQ ID NO: 5035 - RNA, 20 nt, Artificial Sequence
  Antisense oligonucleotide
  misc_feature (1)..(1): BNA scaffold modification
  misc_feature (11)..(11): BNA scaffold modification
  misc_feature (20)..(20): BNA scaffold modification
cacugauucugaauucuuuc

SEQ ID NO: 5036 - RNA, 20 nt, Artificial Sequence
  Antisense oligonucleotide
  misc_feature (1)..(1): BNA scaffold modification
  misc_feature (16)..(16): BNA scaffold modification
  misc_feature (20)..(20): BNA scaffold modification
cacugauucugaauucuuuc

SEQ ID NO: 5037 - RNA, 20 nt, Artificial Sequence
  Antisense oligonucleotide
  misc_feature (1)..(1): BNA scaffold modification
  misc_feature (9)..(9): BNA scaffold modification
  misc_feature (16)..(16): BNA scaffold modification
  misc_feature (20)..(20): BNA scaffold modification
cacugauucugaauucuuuc

SEQ ID NO: 5038 - RNA, 20 nt, Artificial Sequence
  Antisense oligonucleotide
  misc_feature (1)..(1): BNA scaffold modification
  misc_feature (5)..(5): BNA scaffold modification
  misc_feature (11)..(11): BNA scaffold modification
  misc_feature (20)..(20): BNA scaffold modification
cacugauucugaauucuuuc

SEQ ID NO: 5039 - RNA, 20 nt, Artificial Sequence
  Antisense oligonucleotide
  misc_feature (1)..(1): BNA scaffold modification
  misc_feature (3)..(3): BNA scaffold modification
  misc_feature (9)..(9): BNA scaffold modification
  misc_feature (20)..(20): BNA scaffold modification
cacugauucugaauucuuuc

SEQ ID NO: 5040 - RNA, 20 nt, Artificial Sequence
  Antisense oligonucleotide
  misc_feature (1)..(2): BNA scaffold modification
  misc_feature (19)..(20): BNA scaffold modification
cacugauucugaauucuutc

SEQ ID NO: 5041 - RNA, 20 nt, Artificial Sequence
  Antisense oligonucleotide
  misc_feature (1)..(2): BNA scaffold modification
  misc_feature (11)..(11): BNA scaffold modification
  misc_feature (19)..(20): BNA scaffold modification
cacugauucugaauucuutc

SEQ ID NO: 5042 - RNA, 20 nt, Artificial Sequence
  Antisense oligonucleotide
  misc_feature (1)..(2): BNA scaffold modification
  misc_feature (9)..(9): BNA scaffold modification
  misc_feature (19)..(20): BNA scaffold modification
cacugauucugaauucuutc

SEQ ID NO: 5043 - RNA, 18 nt, Artificial Sequence
  Antisense oligonucleotide
  misc_feature (1)..(1): BNA scaffold modification
  misc_feature (18)..(18): BNA scaffold modification
cccacugauucugaauuc

SEQ ID NO: 5044 - RNA, 18 nt, Artificial Sequence
  Antisense oligonucleotide
  misc_feature (1)..(1): BNA scaffold modification
  misc_feature (5)..(5): BNA scaffold modification
  misc_feature (18)..(18): BNA scaffold modification
cccacugauucugaauuc

SEQ ID NO: 5045 - RNA, 18 nt, Artificial Sequence
  Antisense oligonucleotide
  misc_feature (1)..(1): BNA scaffold modification
  misc_feature (7)..(7): BNA scaffold modification
  misc_feature (18)..(18): BNA scaffold modification
cccacugauucugaauuc

SEQ ID NO: 5046 - RNA, 18 nt, Artificial Sequence
  Antisense oligonucleotide
  misc_feature (1)..(1): BNA scaffold modification
  misc_feature (11)..(11): BNA scaffold modification
  misc_feature (18)..(18): BNA scaffold modification
cccacugauucugaauuc

SEQ ID NO: 5047 - RNA, 18 nt, Artificial Sequence
  Antisense oligonucleotide
  misc_feature (1)..(1): BNA scaffold modification
  misc_feature (13)..(13): BNA scaffold modification
  misc_feature (18)..(18): BNA scaffold modification
cccacugauucugaauuc

SEQ ID NO: 5048 - RNA, 18 nt, Artificial Sequence
  Antisense oligonucleotide
  misc_feature (1)..(1): BNA scaffold modification
  misc_feature (7)..(7): BNA scaffold modification
  misc_feature (13)..(13): BNA scaffold modification
  misc_feature (18)..(18): BNA scaffold modification
cccacugauucugaauuc

SEQ ID NO: 5049 - RNA, 18 nt, Artificial Sequence
  Antisense oligonucleotide
  misc_feature (1)..(1): BNA scaffold modification
  misc_feature (5)..(5): BNA scaffold modification
  misc_feature (11)..(11): BNA scaffold modification
  misc_feature (18)..(18): BNA scaffold modification
cccacugauucugaauuc

SEQ ID NO: 5050 - RNA, 18 nt, Artificial Sequence
  Antisense oligonucleotide
  misc_feature (1)..(1): BNA scaffold modification
  misc_feature (5)..(5): BNA scaffold modification
  misc_feature (13)..(13): BNA scaffold modification
  misc_feature (18)..(18): BNA scaffold modification
cccacugauucugaauuc

SEQ ID NO: 5051 - RNA, 18 nt, Artificial Sequence
  Antisense oligonucleotide
  misc_feature (1)..(1): BNA scaffold modification
  misc_feature (17)..(18): BNA scaffold modification
cccacugauucugaautc

SEQ ID NO: 5052 - RNA, 18 nt, Artificial Sequence
  Antisense oligonucleotide
  misc_feature (1)..(2): BNA scaffold modification
  misc_feature (17)..(18): BNA scaffold modification
cccacugauucugaautc

SEQ ID NO: 5053 - RNA, 18 nt, Artificial Sequence
  Antisense oligonucleotide
  misc_feature (1)..(2): BNA scaffold modification
  misc_feature (7)..(7): BNA scaffold modification
  misc_feature (11)..(11): BNA scaffold modification
  misc_feature (17)..(18): BNA scaffold modification
cccacugauucugaautc

SEQ ID NO: 5054 - RNA, 18 nt, Artificial Sequence
  Antisense oligonucleotide
  misc_feature (1)..(1): BNA scaffold modification
  misc_feature (18)..(18): BNA scaffold modification
ccacugauucugaauuct

SEQ ID NO: 5055 - RNA, 18 nt, Artificial Sequence
  Antisense oligonucleotide
  misc_feature (1)..(1): BNA scaffold modification
  misc_feature (17)..(18): BNA scaffold modification
ccacugauucugaauuct

SEQ ID NO: 5056 - RNA, 18 nt, Artificial Sequence
  Antisense oligonucleotide
  misc_feature (1)..(1): BNA scaffold modification
  misc_feature (12)..(12): BNA scaffold modification
  misc_feature (18)..(18): BNA scaffold modification
ccacugauucugaauuct

SEQ ID NO: 5057 - RNA, 18 nt, Artificial Sequence
  Antisense oligonucleotide
  misc_feature (1)..(1): BNA scaffold modification
  misc_feature (10)..(10): BNA scaffold modification
  misc_feature (18)..(18): BNA scaffold modification
ccacugauucugaauuct

SEQ ID NO: 5058 - RNA, 18 nt, Artificial Sequence
  Antisense oligonucleotide
  misc_feature (1)..(1): BNA scaffold modification
  misc_feature (6)..(6): BNA scaffold modification
  misc_feature (18)..(18): BNA scaffold modification
ccacugauucugaauuct

SEQ ID NO: 5059 - RNA, 18 nt, Artificial Sequence
  Antisense oligonucleotide
  misc_feature (1)..(1): BNA scaffold modification
  misc_feature (4)..(4): BNA scaffold modification
  misc_feature (18)..(18): BNA scaffold modification
ccacugauucugaauuct

SEQ ID NO: 5060 - RNA, 18 nt, Artificial Sequence
  Antisense oligonucleotide
  misc_feature (1)..(1): BNA scaffold modification
  misc_feature (4)..(4): BNA scaffold modification
  misc_feature (10)..(10): BNA scaffold modification
  misc_feature (18)..(18): BNA scaffold modification
ccacugauucugaauuct

SEQ ID NO: 5061 - RNA, 18 nt, Artificial Sequence
  Antisense oligonucleotide
  misc_feature (1)..(1): BNA scaffold modification
  misc_feature (6)..(6): BNA scaffold modification
  misc_feature (12)..(12): BNA scaffold modification
  misc_feature (18)..(18): BNA scaffold modification
ccacugauucugaauuct

SEQ ID NO: 5062 - RNA, 18 nt, Artificial Sequence
  Antisense oligonucleotide
  misc_feature (1)..(1): BNA scaffold modification
  misc_feature (6)..(6): BNA scaffold modification
  misc_feature (12)..(12): BNA scaffold modification
  misc_feature (17)..(18): BNA scaffold modification
ccacugauucugaauuct

SEQ ID NO: 5063 - RNA, 18 nt, Artificial Sequence
  Antisense oligonucleotide
  misc_feature (1)..(2): BNA scaffold modification
  misc_feature (17)..(18): BNA scaffold modification
ccacugauucugaauuct

SEQ ID NO: 5064 - RNA, 18 nt, Artificial Sequence
  Antisense oligonucleotide
  misc_feature (1)..(2): BNA scaffold modification
  misc_feature (6)..(6): BNA scaffold modification
  misc_feature (12)..(12): BNA scaffold modification
  misc_feature (17)..(18): BNA scaffold modification
ccacugauucugaauuct

SEQ ID NO: 5065 - RNA, 18 nt, Artificial Sequence
  Antisense oligonucleotide
  misc_feature (1)..(1): BNA scaffold modification
  misc_feature (18)..(18): BNA scaffold modification
cacugauucugaauucut

SEQ ID NO: 5066 - RNA, 18 nt, Artificial Sequence
  Antisense oligonucleotide
  misc_feature (1)..(1): BNA scaffold modification
  misc_feature (16)..(16): BNA scaffold modification
  misc_feature (18)..(18): BNA scaffold modification
cacugauucugaauucut

SEQ ID NO: 5067 - RNA, 18 nt, Artificial Sequence
  Antisense oligonucleotide
  misc_feature (1)..(1): BNA scaffold modification
  misc_feature (11)..(11): BNA scaffold modification
  misc_feature (18)..(18): BNA scaffold modification
cacugauucugaauucut

SEQ ID NO: 5068 - RNA, 18 nt, Artificial Sequence
  Antisense oligonucleotide
  misc_feature (1)..(1): BNA scaffold modification
  misc_feature (9)..(9): BNA scaffold modification
  misc_feature (18)..(18): BNA scaffold modification
cacugauucugaauucut

SEQ ID NO: 5069 - RNA, 18 nt, Artificial Sequence
  Antisense oligonucleotide
  misc_feature (1)..(1): BNA scaffold modification
  misc_feature (5)..(5): BNA scaffold modification
  misc_feature (18)..(18): BNA scaffold modification
cacugauucugaauucut

SEQ ID NO: 5070 - RNA, 18 nt, Artificial Sequence
  Antisense oligonucleotide
  misc_feature (1)..(1): BNA scaffold modification
  misc_feature (3)..(3): BNA scaffold modification
  misc_feature (18)..(18): BNA scaffold modification
cacugauucugaauucut

SEQ ID NO: 5071 - RNA, 18 nt, Artificial Sequence
  Antisense oligonucleotide
  misc_feature (1)..(1): BNA scaffold modification
  misc_feature (3)..(3): BNA scaffold modification
  misc_feature (9)..(9): BNA scaffold modification
  misc_feature (18)..(18): BNA scaffold modification
cacugauucugaauucut

SEQ ID NO: 5072 - RNA, 18 nt, Artificial Sequence
  Antisense oligonucleotide
  misc_feature (1)..(1): BNA scaffold modification
  misc_feature (9)..(9): BNA scaffold modification
  misc_feature (16)..(16): BNA scaffold modification
  misc_feature (18)..(18): BNA scaffold modification
cacugauucugaauucut

SEQ ID NO: 5073 - RNA, 18 nt, Artificial Sequence
  Antisense oligonucleotide
  misc_feature (1)..(1): BNA scaffold modification
  misc_feature (5)..(5): BNA scaffold modification
  misc_feature (11)..(11): BNA scaffold modification
  misc_feature (18)..(18): BNA scaffold modification
cacugauucugaauucut

SEQ ID NO: 5074 - RNA, 18 nt, Artificial Sequence
  Antisense oligonucleotide
  misc_feature (1)..(2): BNA scaffold modification
  misc_feature (17)..(18): BNA scaffold modification
cacugauucugaauuctt

SEQ ID NO: 5075 - RNA, 18 nt, Artificial Sequence
  Antisense oligonucleotide
  misc_feature (1)..(2): BNA scaffold modification
  misc_feature (9)..(9): BNA scaffold modification
  misc_feature (11)..(11): BNA scaffold modification
  misc_feature (17)..(18): BNA scaffold modification
cacugauucugaauuctt

SEQ ID NO: 5076 - RNA, 18 nt, Artificial Sequence
  Antisense oligonucleotide
  misc_feature (1)..(1): BNA scaffold modification
  misc_feature (18)..(18): BNA scaffold modification
acugauucugaauucuut

SEQ ID NO: 5077 - RNA, 18 nt, Artificial Sequence
  Antisense oligonucleotide
  misc_feature (1)..(1): BNA scaffold modification
  misc_feature (4)..(4): BNA scaffold modification
  misc_feature (18)..(18): BNA scaffold modification
acugauucugaauucuut

SEQ ID NO: 5078 - RNA, 18 nt, Artificial Sequence
  Antisense oligonucleotide
  misc_feature (1)..(1): BNA scaffold modification
  misc_feature (8)..(8): BNA scaffold modification
  misc_feature (18)..(18): BNA scaffold modification
acugauucugaauucuut

SEQ ID NO: 5079 - RNA, 18 nt, Artificial Sequence
  Antisense oligonucleotide
  misc_feature (1)..(1): BNA scaffold modification
  misc_feature (10)..(10): BNA scaffold modification
  misc_feature (18)..(18): BNA scaffold modification
acugauucugaauucuut

SEQ ID NO: 5080 - RNA, 18 nt, Artificial Sequence
  Antisense oligonucleotide
  misc_feature (1)..(1): BNA scaffold modification
  misc_feature (15)..(15): BNA scaffold modification
  misc_feature (18)..(18): BNA scaffold modification
acugauucugaauucuut

SEQ ID NO: 5081 - RNA, 18 nt, Artificial Sequence
  Antisense oligonucleotide
  misc_feature (1)..(1): BNA scaffold modification
  misc_feature (8)..(8): BNA scaffold modification
  misc_feature (15)..(15): BNA scaffold modification
  misc_feature (18)..(18): BNA scaffold modification
acugauucugaauucuut

SEQ ID NO: 5082 - RNA, 18 nt, Artificial Sequence
  Antisense oligonucleotide
  misc_feature (1)..(1): BNA scaffold modification
  misc_feature (4)..(4): BNA scaffold modification
  misc_feature (10)..(10): BNA scaffold modification
  misc_feature (18)..(18): BNA scaffold modification
acugauucugaauucuut

SEQ ID NO: 5083 - RNA, 18 nt, Artificial Sequence
  Antisense oligonucleotide
  misc_feature (1)..(1): BNA scaffold modification
  misc_feature (4)..(4): BNA scaffold modification
  misc_feature (15)..(15): BNA scaffold modification
  misc_feature (18)..(18): BNA scaffold modification
acugauucugaauucuut

SEQ ID NO: 5084 - RNA, 18 nt, Artificial Sequence
  Antisense oligonucleotide
  misc_feature (1)..(2): BNA scaffold modification
  misc_feature (17)..(18): BNA scaffold modification
acugauucugaauucutt

SEQ ID NO: 5085 - RNA, 18 nt, Artificial Sequence
  Antisense oligonucleotide
  misc_feature (1)..(2): BNA scaffold modification
  misc_feature (10)..(10): BNA scaffold modification
  misc_feature (17)..(18): BNA scaffold modification
acugauucugaauucutt

SEQ ID NO: 5086 - RNA, 18 nt, Artificial Sequence
  Antisense oligonucleotide
  misc_feature (1)..(2): BNA scaffold modification
  misc_feature (4)..(4): BNA scaffold modification
  misc_feature (10)..(10): BNA scaffold modification
  misc_feature (17)..(18): BNA scaffold modification
acugauucugaauucutt

SEQ ID NO: 5087 - RNA, 18 nt, Artificial Sequence
  Antisense oligonucleotide
  misc_feature (1)..(1): BNA scaffold modification
  misc_feature (18)..(18): BNA scaffold modification
cugauucugaauucuuuc

SEQ ID NO: 5088 - RNA, 18 nt, Artificial Sequence
  Antisense oligonucleotide
  misc_feature (1)..(1): BNA scaffold modification
  misc_feature (3)..(3): BNA scaffold modification
  misc_feature (18)..(18): BNA scaffold modification
cugauucugaauucuuuc

SEQ ID NO: 5089 - RNA, 18 nt, Artificial Sequence
  Antisense oligonucleotide
  misc_feature (1)..(1): BNA scaffold modification
  misc_feature (7)..(7): BNA scaffold modification
  misc_feature (18)..(18): BNA scaffold modification
cugauucugaauucuuuc

SEQ ID NO: 5090 - RNA, 18 nt, Artificial Sequence
  Antisense oligonucleotide
  misc_feature (1)..(1): BNA scaffold modification
  misc_feature (9)..(9): BNA scaffold modification
  misc_feature (18)..(18): BNA scaffold modification
cugauucugaauucuuuc

SEQ ID NO: 5091 - RNA, 18 nt, Artificial Sequence
  Antisense oligonucleotide
  misc_feature (1)..(1): BNA scaffold modification
  misc_feature (14)..(14): BNA scaffold modification
  misc_feature (18)..(18): BNA scaffold modification
cugauucugaauucuuuc

SEQ ID NO: 5092 - RNA, 18 nt, Artificial Sequence
  Antisense oligonucleotide
  misc_feature (1)..(1): BNA scaffold modification
  misc_feature (7)..(7): BNA scaffold modification
  misc_feature (14)..(14): BNA scaffold modification
  misc_feature (18)..(18): BNA scaffold modification
cugauucugaauucuuuc

SEQ ID NO: 5093 - RNA, 18 nt, Artificial Sequence
  Antisense oligonucleotide
  misc_feature (1)..(1): BNA scaffold modification
  misc_feature (3)..(3): BNA scaffold modification
  misc_feature (9)..(9): BNA scaffold modification
  misc_feature (18)..(18): BNA scaffold modification
cugauucugaauucuuuc

SEQ ID NO: 5094 - RNA, 18 nt, Artificial Sequence
  Antisense oligonucleotide
  misc_feature (1)..(1): BNA scaffold modification
  misc_feature (3)..(3): BNA scaffold modification
  misc_feature (9)..(9): BNA scaffold modification
  misc_feature (14)..(14): BNA scaffold modification
  misc_feature (18)..(18): BNA scaffold modification
cugauucugaauucuuuc

SEQ ID NO: 5095 - RNA, 18 nt, Artificial Sequence
  Antisense oligonucleotide
  misc_feature (1)..(2): BNA scaffold modification
  misc_feature (17)..(18): BNA scaffold modification
ctgauucugaauucuutc

SEQ ID NO: 5096 - RNA, 18 nt, Artificial Sequence
  Antisense oligonucleotide
  misc_feature (1)..(2): BNA scaffold modification
  misc_feature (9)..(9): BNA scaffold modification
  misc_feature (17)..(18): BNA scaffold modification
ctgauucugaauucuutc

SEQ ID NO: 5097 - RNA, 18 nt, Artificial Sequence
  Antisense oligonucleotide
  misc_feature (1)..(2): BNA scaffold modification
  misc_feature (7)..(7): BNA scaffold modification
  misc_feature (14)..(14): BNA scaffold modification
  misc_feature (17)..(18): BNA scaffold modification
ctgauucugaauucuutc

SEQ ID NO: 5098 - RNA, 16 nt, Artificial Sequence
  Antisense oligonucleotide
  misc_feature (1)..(1): BNA scaffold modification
  misc_feature (16)..(16): BNA scaffold modification
cccacugauucugaat

SEQ ID NO: 5099 - RNA, 16 nt, Artificial Sequence
  Antisense oligonucleotide
  misc_feature (1)..(1): BNA scaffold modification
  misc_feature (5)..(5): BNA scaffold modification
  misc_feature (16)..(16): BNA scaffold modification
cccacugauucugaat

SEQ ID NO: 5100 - RNA, 16 nt, Artificial Sequence
  Antisense oligonucleotide
  misc_feature (1)..(1): BNA scaffold modification
  misc_feature (7)..(7): BNA scaffold modification
  misc_feature (16)..(16): BNA scaffold modification
cccacugauucugaat

SEQ ID NO: 5101 - RNA, 16 nt, Artificial Sequence
  Antisense oligonucleotide
  misc_feature (1)..(1): BNA scaffold modification
  misc_feature (11)..(11): BNA scaffold modification
  misc_feature (16)..(16): BNA scaffold modification
cccacugauucugaat

SEQ ID NO: 5102 - RNA, 16 nt, Artificial Sequence
  Antisense oligonucleotide
  misc_feature (1)..(1): BNA scaffold modification
  misc_feature (13)..(13): BNA scaffold modification
  misc_feature (16)..(16): BNA scaffold modification
cccacugauucugaat

SEQ ID NO: 5103 - RNA, 16 nt, Artificial Sequence
  Antisense oligonucleotide
  misc_feature (1)..(1): BNA scaffold modification
  misc_feature (7)..(7): BNA scaffold modification
  misc_feature (13)..(13): BNA scaffold modification
  misc_feature (16)..(16): BNA scaffold modification
cccacugauucugaat

SEQ ID NO: 5104 - RNA, 16 nt, Artificial Sequence
  Antisense oligonucleotide
  misc_feature (1)..(1): BNA scaffold modification
  misc_feature (5)..(5): BNA scaffold modification
  misc_feature (11)..(11): BNA scaffold modification
  misc_feature (16)..(16): BNA scaffold modification
cccacugauucugaat

SEQ ID NO: 5105 - RNA, 16 nt, Artificial Sequence
  Antisense oligonucleotide
  misc_feature (1)..(1): BNA scaffold modification
  misc_feature (15)..(16): BNA scaffold modification
cccacugauucugaat

SEQ ID NO: 5106 - RNA, 16 nt, Artificial Sequence
  Antisense oligonucleotide
  misc_feature (1)..(2): BNA scaffold modification
  misc_feature (15)..(16): BNA scaffold modification
cccacugauucugaat

SEQ ID NO: 5107 - RNA, 16 nt, Artificial Sequence
  Antisense oligonucleotide
  misc_feature (1)..(2): BNA scaffold modification
  misc_feature (7)..(7): BNA scaffold modification
  misc_feature (15)..(16): BNA scaffold modification
cccacugauucugaat

SEQ ID NO: 5108 - RNA, 16 nt, Artificial Sequence
  Antisense oligonucleotide
  misc_feature (1)..(2): BNA scaffold modification
  misc_feature (7)..(7): BNA scaffold modification
  misc_feature (11)..(11): BNA scaffold modification
  misc_feature (15)..(16): BNA scaffold modification
cccacugauucugaat

SEQ ID NO: 5109 - RNA, 16 nt, Artificial Sequence
  Antisense oligonucleotide
  misc_feature (1)..(1): BNA scaffold modification
  misc_feature (16)..(16): BNA scaffold modification
ccacugauucugaaut

SEQ ID NO: 5110 - RNA, 16 nt, Artificial Sequence
  Antisense oligonucleotide
  misc_feature (1)..(1): BNA scaffold modification
  misc_feature (4)..(4): BNA scaffold modification
  misc_feature (16)..(16): BNA scaffold modification
ccacugauucugaaut

SEQ ID NO: 5111 - RNA, 16 nt, Artificial Sequence
  Antisense oligonucleotide
  misc_feature (1)..(1): BNA scaffold modification
  misc_feature (6)..(6): BNA scaffold modification
  misc_feature (16)..(16): BNA scaffold modification
ccacugauucugaaut

SEQ ID NO: 5112 - RNA, 16 nt, Artificial Sequence
  Antisense oligonucleotide
  misc_feature (1)..(1): BNA scaffold modification
  misc_feature (10)..(10): BNA scaffold modification
  misc_feature (16)..(16): BNA scaffold modification
ccacugauucugaaut

SEQ ID NO: 5113 - RNA, 16 nt, Artificial Sequence
  Antisense oligonucleotide
  misc_feature (1)..(1): BNA scaffold modification
  misc_feature (12)..(12): BNA scaffold modification
  misc_feature (16)..(16): BNA scaffold modification
ccacugauucugaaut

SEQ ID NO: 5114 - RNA, 16 nt, Artificial Sequence
  Antisense oligonucleotide
  misc_feature (1)..(1): BNA scaffold modification
  misc_feature (6)..(6): BNA scaffold modification
  misc_feature (12)..(12): BNA scaffold modification
  misc_feature (16)..(16): BNA scaffold modification
ccacugauucugaaut

SEQ ID NO: 5115 - RNA, 16 nt, Artificial Sequence
  Antisense oligonucleotide
  misc_feature (1)..(1): BNA scaffold modification
  misc_feature (4)..(4): BNA scaffold modification
  misc_feature (10)..(10): BNA scaffold modification
  misc_feature (16)..(16): BNA scaffold modification
ccacugauucugaaut

SEQ ID NO: 5116 - RNA, 16 nt, Artificial Sequence
  Antisense oligonucleotide
  misc_feature (1)..(1): BNA scaffold modification
  misc_feature (15)..(16): BNA scaffold modification
ccacugauucugaatt

SEQ ID NO: 5117 - RNA, 16 nt, Artificial Sequence
  Antisense oligonucleotide
  misc_feature (1)..(2): BNA scaffold modification
  misc_feature (15)..(16): BNA scaffold modification
ccacugauucugaatt

SEQ ID NO: 5118 - RNA, 16 nt, Artificial Sequence
  Antisense oligonucleotide
  misc_feature (1)..(2): BNA scaffold modification
  misc_feature (12)..(12): BNA scaffold modification
  misc_feature (15)..(16): BNA scaffold modification
ccacugauucugaatt

SEQ ID NO: 5119 - RNA, 16 nt, Artificial Sequence
  Antisense oligonucleotide
  misc_feature (1)..(1): BNA scaffold modification
  misc_feature (4)..(4): BNA scaffold modification
  misc_feature (6)..(6): BNA scaffold modification
  misc_feature (10)..(10): BNA scaffold modification
  misc_feature (15)..(16): BNA scaffold modification
ccacugauucugaatt

SEQ ID NO: 5120 - RNA, 16 nt, Artificial Sequence
  Antisense oligonucleotide
  misc_feature (1)..(1): BNA scaffold modification
  misc_feature (16)..(16): BNA scaffold modification
cacugauucugaauuc

SEQ ID NO: 5121 - RNA, 16 nt, Artificial Sequence
  Antisense oligonucleotide
  misc_feature (1)..(1): BNA scaffold modification
  misc_feature (3)..(3): BNA scaffold modification
  misc_feature (16)..(16): BNA scaffold modification
cacugauucugaauuc

SEQ ID NO: 5122 - RNA, 16 nt, Artificial Sequence
  Antisense oligonucleotide
  misc_feature (1)..(1): BNA scaffold modification
  misc_feature (5)..(5): BNA scaffold modification
  misc_feature (16)..(16): BNA scaffold modification
cacugauucugaauuc

SEQ ID NO: 5123 - RNA, 16 nt, Artificial Sequence
  Antisense oligonucleotide
  misc_feature (1)..(1): BNA scaffold modification
  misc_feature (9)..(9): BNA scaffold modification
  misc_feature (16)..(16): BNA scaffold modification
cacugauucugaauuc

SEQ ID NO: 5124 - RNA, 16 nt, Artificial Sequence
  Antisense oligonucleotide
  misc_feature (1)..(1): BNA scaffold modification
  misc_feature (11)..(11): BNA scaffold modification
  misc_feature (16)..(16): BNA scaffold modification
cacugauucugaauuc

SEQ ID NO: 5125 - RNA, 16 nt, Artificial Sequence
  Antisense oligonucleotide
  misc_feature (1)..(1): BNA scaffold modification
  misc_feature (5)..(5): BNA scaffold modification
  misc_feature (11)..(11): BNA scaffold modification
  misc_feature (16)..(16): BNA scaffold modification
cacugauucugaauuc

SEQ ID NO: 5126 - RNA, 16 nt, Artificial Sequence
  Antisense oligonucleotide
  misc_feature (1)..(1): BNA scaffold modification
  misc_feature (3)..(3): BNA scaffold modification
  misc_feature (9)..(9): BNA scaffold modification
  misc_feature (16)..(16): BNA scaffold modification
cacugauucugaauuc

SEQ ID NO: 5127 - RNA, 16 nt, Artificial Sequence
  Antisense oligonucleotide
  misc_feature (1)..(2): BNA scaffold modification
  misc_feature (5)..(5): BNA scaffold modification
  misc_feature (15)..(16): BNA scaffold modification
cacugauucugaautc

SEQ ID NO: 5128 - RNA, 16 nt, Artificial Sequence
  Antisense oligonucleotide
  misc_feature (1)..(1): BNA scaffold modification
  misc_feature (3)..(3): BNA scaffold modification
  misc_feature (9)..(9): BNA scaffold modification
  misc_feature (15)..(16): BNA scaffold modification
cacugauucugaautc

SEQ ID NO: 5129 - RNA, 16 nt, Artificial Sequence
  Antisense oligonucleotide
  misc_feature (1)..(2): BNA scaffold modification
  misc_feature (15)..(16): BNA scaffold modification
cacugauucugaautc

SEQ ID NO: 5130 - RNA, 16 nt, Artificial Sequence
  Antisense oligonucleotide
  misc_feature (1)..(2): BNA scaffold modification
  misc_feature (5)..(5): BNA scaffold modification
  misc_feature (11)..(11): BNA scaffold modification
  misc_feature (15)..(16): BNA scaffold modification
cacugauucugaautc

SEQ ID NO: 5131 - RNA, 16 nt, Artificial Sequence
  Antisense oligonucleotide
  misc_feature (1)..(1): BNA scaffold modification
  misc_feature (16)..(16): BNA scaffold modification
acugauucugaauuct

SEQ ID NO: 5132 - RNA, 16 nt, Artificial Sequence
  Antisense oligonucleotide
  misc_feature (1)..(1): BNA scaffold modification
  misc_feature (4)..(4): BNA scaffold modification
  misc_feature (16)..(16): BNA scaffold modification
acugauucugaauuct

SEQ ID NO: 5133 - RNA, 16 nt, Artificial Sequence
  Antisense oligonucleotide
  misc_feature (1)..(1): BNA scaffold modification
  misc_feature (8)..(8): BNA scaffold modification
  misc_feature (16)..(16): BNA scaffold modification
acugauucugaauuct

SEQ ID NO: 5134 - RNA, 16 nt, Artificial Sequence
  Antisense oligonucleotide
  misc_feature (2)..(2): BNA scaffold modification
  misc_feature (10)..(10): BNA scaffold modification
  misc_feature (16)..(16): BNA scaffold modification
acugauucugaauuct

SEQ ID NO: 5135 - RNA, 16 nt, Artificial Sequence
  Antisense oligonucleotide
  misc_feature (1)..(1): BNA scaffold modification
  misc_feature (10)..(10): BNA scaffold modification
  misc_feature (16)..(16): BNA scaffold modification
acugauucugaauuct

SEQ ID NO: 5136 - RNA, 16 nt, Artificial Sequence
  Antisense oligonucleotide
  misc_feature (1)..(1): BNA scaffold modification
  misc_feature (4)..(4): BNA scaffold modification
  misc_feature (10)..(10): BNA scaffold modification
  misc_feature (16)..(16): BNA scaffold modification
acugauucugaauuct

SEQ ID NO: 5137 - RNA, 16 nt, Artificial Sequence
  Antisense oligonucleotide
  misc_feature (2)..(2): BNA scaffold modification
  misc_feature (8)..(8): BNA scaffold modification
  misc_feature (16)..(16): BNA scaffold modification
acugauucugaauuct

SEQ ID NO: 5138 - RNA, 16 nt, Artificial Sequence
  Antisense oligonucleotide
  misc_feature (1)..(1): BNA scaffold modification
  misc_feature (15)..(16): BNA scaffold modification
acugauucugaauuct

SEQ ID NO: 5139 - RNA, 16 nt, Artificial Sequence
  Antisense oligonucleotide
  misc_feature (1)..(1): BNA scaffold modification
  misc_feature (4)..(4): BNA scaffold modification
  misc_feature (8)..(8): BNA scaffold modification
  misc_feature (15)..(16): BNA scaffold modification
acugauucugaauuct

SEQ ID NO: 5140 - RNA, 16 nt, Artificial Sequence
  Antisense oligonucleotide
  misc_feature (1)..(1): BNA scaffold modification
  misc_feature (8)..(8): BNA scaffold modification
  misc_feature (10)..(10): BNA scaffold modification
  misc_feature (15)..(16): BNA scaffold modification
acugauucugaauuct

SEQ ID NO: 5141 - RNA, 16 nt, Artificial Sequence
  Antisense oligonucleotide
  misc_feature (2)..(2): BNA scaffold modification
  misc_feature (4)..(4): BNA scaffold modification
  misc_feature (8)..(8): BNA scaffold modification
  misc_feature (10)..(10): BNA scaffold modification
  misc_feature (15)..(16): BNA scaffold modification
acugauucugaauuct

SEQ ID NO: 5142 - RNA, 16 nt, Artificial Sequence
  Antisense oligonucleotide
  misc_feature (1)..(1): BNA scaffold modification
  misc_feature (16)..(16): BNA scaffold modification
cugauucugaauucut

SEQ ID NO: 5143 - RNA, 16 nt, Artificial Sequence
  Antisense oligonucleotide
  misc_feature (1)..(1): BNA scaffold modification
  misc_feature (3)..(3): BNA scaffold modification
  misc_feature (16)..(16): BNA scaffold modification
cugauucugaauucut

SEQ ID NO: 5144 - RNA, 16 nt, Artificial Sequence
  Antisense oligonucleotide
  misc_feature (1)..(1): BNA scaffold modification
  misc_feature (7)..(7): BNA scaffold modification
  misc_feature (16)..(16): BNA scaffold modification
cugauucugaauucut

SEQ ID NO: 5145 - RNA, 16 nt, Artificial Sequence
  Antisense oligonucleotide
  misc_feature (1)..(1): BNA scaffold modification
  misc_feature (9)..(9): BNA scaffold modification
  misc_feature (16)..(16): BNA scaffold modification
cugauucugaauucut

SEQ ID NO: 5146 - RNA, 16 nt, Artificial Sequence
  Antisense oligonucleotide
  misc_feature (1)..(1): BNA scaffold modification
  misc_feature (14)..(14): BNA scaffold modification
  misc_feature (16)..(16): BNA scaffold modification
cugauucugaauucut

SEQ ID NO: 5147 - RNA, 16 nt, Artificial Sequence
  Antisense oligonucleotide
  misc_feature (1)..(1): BNA scaffold modification
  misc_feature (14)..(14): BNA scaffold modification
  misc_feature (16)..(16): BNA scaffold modification
cugauucugaauucut

SEQ ID NO: 5148 - RNA, 16 nt, Artificial Sequence
  Antisense oligonucleotide
  misc_feature (1)..(1): BNA scaffold modification
  misc_feature (3)..(3): BNA scaffold modification
  misc_feature (9)..(9): BNA scaffold modification
  misc_feature (16)..(16): BNA scaffold modification
cugauucugaauucut

SEQ ID NO: 5149 - RNA, 16 nt, Artificial Sequence
  Antisense oligonucleotide
  misc_feature (1)..(1): BNA scaffold modification
  misc_feature (3)..(3): BNA scaffold modification
  misc_feature (14)..(14): BNA scaffold modification
  misc_feature (16)..(16): BNA scaffold modification
cugauucugaauucut

SEQ ID NO: 5150 - RNA, 16 nt, Artificial Sequence
  Antisense oligonucleotide
  misc_feature (1)..(1): BNA scaffold modification
  misc_feature (7)..(7): BNA scaffold modification
  misc_feature (9)..(9): BNA scaffold modification
  misc_feature (15)..(16): BNA scaffold modification
cugauucugaauuctt

SEQ ID NO: 5151 - RNA, 16 nt, Artificial Sequence
  Antisense oligonucleotide
  misc_feature (1)..(2): BNA scaffold modification
  misc_feature (15)..(16): BNA scaffold modification
ctgauucugaauuctt

SEQ ID NO: 5152 - RNA, 16 nt, Artificial Sequence
  Antisense oligonucleotide
  misc_feature (1)..(2): BNA scaffold modification
  misc_feature (9)..(9): BNA scaffold modification
  misc_feature (14)..(16): BNA scaffold modification
ctgauucugaauuctt

SEQ ID NO: 5153 - RNA, 16 nt, Artificial Sequence
  Antisense oligonucleotide
  misc_feature (1)..(1): BNA scaffold modification
  misc_feature (16)..(16): BNA scaffold modification
tgauucugaauucuut

SEQ ID NO: 5154 - RNA, 16 nt, Artificial Sequence
  Antisense oligonucleotide
  misc_feature (1)..(2): BNA scaffold modification
  misc_feature (16)..(16): BNA scaffold modification
tgauucugaauucuut

SEQ ID NO: 5155 - RNA, 16 nt, Artificial Sequence
  Antisense oligonucleotide
  misc_feature (1)..(1): BNA scaffold modification
  misc_feature (6)..(6): BNA scaffold modification
  misc_feature (16)..(16): BNA scaffold modification
tgauucugaauucuut

SEQ ID NO: 5156 - RNA, 16 nt, Artificial Sequence
  Antisense oligonucleotide
  misc_feature (1)..(1): BNA scaffold modification
  misc_feature (8)..(8): BNA scaffold modification
  misc_feature (16)..(16): BNA scaffold modification
tgauucugaauucuut

SEQ ID NO: 5157 - RNA, 16 nt, Artificial Sequence
  Antisense oligonucleotide
  misc_feature (1)..(1): BNA scaffold modification
  misc_feature (13)..(13): BNA scaffold modification
  misc_feature (16)..(16): BNA scaffold modification
tgauucugaauucuut

SEQ ID NO: 5158 - RNA, 16 nt, Artificial Sequence
  Antisense oligonucleotide
  misc_feature (1)..(1): BNA scaffold modification
  misc_feature (6)..(6): BNA scaffold modification
  misc_feature (13)..(13): BNA scaffold modification
  misc_feature (16)..(16): BNA scaffold modification
tgauucugaauucuut

SEQ ID NO: 5159 - RNA, 16 nt, Artificial Sequence
  Antisense oligonucleotide
  misc_feature (1)..(2): BNA scaffold modification
  misc_feature (8)..(8): BNA scaffold modification
  misc_feature (16)..(16): BNA scaffold modification
tgauucugaauucuut

SEQ ID NO: 5160 - RNA, 16 nt, Artificial Sequence
  Antisense oligonucleotide
  misc_feature (1)..(2): BNA scaffold modification
  misc_feature (6)..(6): BNA scaffold modification
  misc_feature (13)..(13): BNA scaffold modification
  misc_feature (16)..(16): BNA scaffold modification
tgauucugaauucuut

SEQ ID NO: 5161 - RNA, 16 nt, Artificial Sequence
  Antisense oligonucleotide
  misc_feature (1)..(1): BNA scaffold modification
  misc_feature (6)..(6): BNA scaffold modification
  misc_feature (13)..(13): BNA scaffold modification
  misc_feature (15)..(16): BNA scaffold modification
tgauucugaauucutt

SEQ ID NO: 5162 - RNA, 16 nt, Artificial Sequence
  Antisense oligonucleotide
  misc_feature (1)..(2): BNA scaffold modification
  misc_feature (8)..(8): BNA scaffold modification
  misc_feature (15)..(16): BNA scaffold modification
tgauucugaauucutt

SEQ ID NO: 5163 - RNA, 16 nt, Artificial Sequence
  Antisense oligonucleotide
  misc_feature (1)..(2): BNA scaffold modification
  misc_feature (6)..(6): BNA scaffold modification
  misc_feature (8)..(8): BNA scaffold modification
  misc_feature (15)..(16): BNA scaffold modification
tgauucugaauucutt

SEQ ID NO: 5164 - RNA, 16 nt, Artificial Sequence
  Antisense oligonucleotide
  misc_feature (1)..(1): BNA scaffold modification
  misc_feature (16)..(16): BNA scaffold modification
gauucugaauucuuuc

SEQ ID NO: 5165 - RNA, 16 nt, Artificial Sequence
  Antisense oligonucleotide
  misc_feature (1)..(1): BNA scaffold modification
  misc_feature (5)..(5): BNA scaffold modification
  misc_feature (16)..(16): BNA scaffold modification
gauucugaauucuuuc

SEQ ID NO: 5166 - RNA, 16 nt, Artificial Sequence
  Antisense oligonucleotide
  misc_feature (1)..(1): BNA scaffold modification
  misc_feature (7)..(7): BNA scaffold modification
  misc_feature (16)..(16): BNA scaffold modification
gauucugaauucuuuc

SEQ ID NO: 5167 - RNA, 16 nt, Artificial Sequence
  Antisense oligonucleotide
  misc_feature (1)..(1): BNA scaffold modification
  misc_feature (12)..(12): BNA scaffold modification
  misc_feature (16)..(16): BNA scaffold modification
gauucugaauucuuuc

SEQ ID NO: 5168 - RNA, 16 nt, Artificial Sequence
  Antisense oligonucleotide
  misc_feature (1)..(1): BNA scaffold modification
  misc_feature (5)..(5): BNA scaffold modification
  misc_feature (12)..(12): BNA scaffold modification
  misc_feature (16)..(16): BNA scaffold modification
gauucugaauucuuuc

SEQ ID NO: 5169 - RNA, 16 nt, Artificial Sequence
  Antisense oligonucleotide
  misc_feature (1)..(1): BNA scaffold modification
  misc_feature (7)..(7): BNA scaffold modification
  misc_feature (12)..(12): BNA scaffold modification
  misc_feature (16)..(16): BNA scaffold modification
gauucugaauucuuuc

SEQ ID NO: 5170 - RNA, 16 nt, Artificial Sequence
  Antisense oligonucleotide
  misc_feature (1)..(1): BNA scaffold modification
  misc_feature (7)..(7): BNA scaffold modification
  misc_feature (15)..(16): BNA scaffold modification
gauucugaauucuutc

SEQ ID NO: 5171 - RNA, 16 nt, Artificial Sequence
  Antisense oligonucleotide
  misc_feature (1)..(2): BNA scaffold modification
  misc_feature (15)..(16): BNA scaffold modification
gauucugaauucuutc

SEQ ID NO: 5172 - RNA, 16 nt, Artificial Sequence
  Antisense oligonucleotide
  misc_feature (1)..(1): BNA scaffold modification
  misc_feature (5)..(5): BNA scaffold modification
  misc_feature (7)..(7): BNA scaffold modification
  misc_feature (15)..(16): BNA scaffold modification
gauucugaauucuutc

SEQ ID NO: 5173 - RNA, 16 nt, Artificial Sequence
  Antisense oligonucleotide
  misc_feature (1)..(1): BNA scaffold modification
  misc_feature (5)..(5): BNA scaffold modification
  misc_feature (7)..(7): BNA scaffold modification
  misc_feature (12)..(12): BNA scaffold modification
  misc_feature (15)..(16): BNA scaffold modification
gauucugaauucuutc

SEQ ID NO: 5174 - RNA, 24 nt, Artificial Sequence
  Antisense oligonucleotide
  misc_feature (1)..(1): BNA scaffold modification
  misc_feature (24)..(24): BNA scaffold modification
guucuuguacuucaucccacugat

SEQ ID NO: 5175 - RNA, 24 nt, Artificial Sequence
  Antisense oligonucleotide
  misc_feature (1)..(1): BNA scaffold modification
  misc_feature (4)..(4): BNA scaffold modification
  misc_feature (24)..(24): BNA scaffold modification
guucuuguacuucaucccacugat

SEQ ID NO: 5176 - RNA, 24 nt, Artificial Sequence
  Antisense oligonucleotide
  misc_feature (1)..(1): BNA scaffold modification
  misc_feature (7)..(7): BNA scaffold modification
  misc_feature (24)..(24): BNA scaffold modification
guucuuguacuucaucccacugat

SEQ ID NO: 5177 - RNA, 24 nt, Artificial Sequence
  Antisense oligonucleotide
  misc_feature (1)..(1): BNA scaffold modification
  misc_feature (10)..(10): BNA scaffold modification
  misc_feature (24)..(24): BNA scaffold modification
guucuuguacuucaucccacugat

SEQ ID NO: 5178 - RNA, 24 nt, Artificial Sequence
  Antisense oligonucleotide
  misc_feature (1)..(1): BNA scaffold modification
  misc_feature (13)..(13): BNA scaffold modification
  misc_feature (24)..(24): BNA scaffold modification
guucuuguacuucaucccacugat

SEQ ID NO: 5179 - RNA, 24 nt, Artificial Sequence
  Antisense oligonucleotide
  misc_feature (1)..(1): BNA scaffold modification
  misc_feature (20)..(20): BNA scaffold modification
  misc_feature (24)..(24): BNA scaffold modification
guucuuguacuucaucccacugat

SEQ ID NO: 5180 - RNA, 24 nt, Artificial Sequence
  Antisense oligonucleotide
  misc_feature (1)..(1): BNA scaffold modification
  misc_feature (22)..(22): BNA scaffold modification
  misc_feature (24)..(24): BNA scaffold modification
guucuuguacuucaucccacugat

SEQ ID NO: 5181 - RNA, 24 nt, Artificial Sequence
  Antisense oligonucleotide
  misc_feature (1)..(1): BNA scaffold modification
  misc_feature (7)..(7): BNA scaffold modification
  misc_feature (22)..(22): BNA scaffold modification
  misc_feature (24)..(24): BNA scaffold modification
guucuuguacuucaucccacugat

SEQ ID NO: 5182 - RNA, 24 nt, Artificial Sequence
  Antisense oligonucleotide
  misc_feature (1)..(1): BNA scaffold modification
  misc_feature (13)..(13): BNA scaffold modification
  misc_feature (20)..(20): BNA scaffold modification
  misc_feature (24)..(24): BNA scaffold modification
guucuuguacuucaucccacugat

SEQ ID NO: 5183 - RNA, 24 nt, Artificial Sequence
  Antisense oligonucleotide
  misc_feature (1)..(1): BNA scaffold modification
  misc_feature (4)..(4): BNA scaffold modification
  misc_feature (13)..(13): BNA scaffold modification
  misc_feature (24)..(24): BNA scaffold modification
guucuuguacuucaucccacugat

SEQ ID NO: 5184 - RNA, 24 nt, Artificial Sequence
  Antisense oligonucleotide
  misc_feature (1)..(1): BNA scaffold modification
  misc_feature (10)..(10): BNA scaffold modification
  misc_feature (20)..(20): BNA scaffold modification
  misc_feature (24)..(24): BNA scaffold modification
guucuuguacuucaucccacugat

SEQ ID NO: 5185 - RNA, 24 nt, Artificial Sequence
  Antisense oligonucleotide
  misc_feature (1)..(2): BNA scaffold modification
  misc_feature (7)..(7): BNA scaffold modification
  misc_feature (24)..(24): BNA scaffold modification
gtucuuguacuucaucccacugat

SEQ ID NO: 5186 - RNA, 24 nt, Artificial Sequence
  Antisense oligonucleotide
  misc_feature (1)..(2): BNA scaffold modification
  misc_feature (10)..(10): BNA scaffold modification
  misc_feature (20)..(20): BNA scaffold modification
  misc_feature (23)..(24): BNA scaffold modification
gtucuuguacuucaucccacugat

SEQ ID NO: 5187 - RNA, 24 nt, Artificial Sequence
  Antisense oligonucleotide
  misc_feature (1)..(2): BNA scaffold modification
  misc_feature (7)..(7): BNA scaffold modification
  misc_feature (22)..(24): BNA scaffold modification
gtucuuguacuucaucccacugat

SEQ ID NO: 5188 - RNA, 22 nt, Artificial Sequence
  Antisense oligonucleotide
  misc_feature (1)..(1): BNA scaffold modification
  misc_feature (22)..(22): BNA scaffold modification
guucuuguacuucaucccacug

SEQ ID NO: 5189 - RNA, 22 nt, Artificial Sequence
  Antisense oligonucleotide
  misc_feature (1)..(1): BNA scaffold modification
  misc_feature (4)..(4): BNA scaffold modification
  misc_feature (22)..(22): BNA scaffold modification
guucuuguacuucaucccacug

SEQ ID NO: 5190 - RNA, 22 nt, Artificial Sequence
  Antisense oligonucleotide
  misc_feature (1)..(1): BNA scaffold modification
  misc_feature (7)..(7): BNA scaffold modification
  misc_feature (22)..(22): BNA scaffold modification
guucuuguacuucaucccacug

SEQ ID NO: 5191 - RNA, 22 nt, Artificial Sequence
  Antisense oligonucleotide
  misc_feature (1)..(1): BNA scaffold modification
  misc_feature (10)..(10): BNA scaffold modification
  misc_feature (22)..(22): BNA scaffold modification
guucuuguacuucaucccacug

SEQ ID NO: 5192 - RNA, 22 nt, Artificial Sequence
  Antisense oligonucleotide
  misc_feature (1)..(1): BNA scaffold modification
  misc_feature (13)..(13): BNA scaffold modification
  misc_feature (22)..(22): BNA scaffold modification
guucuuguacuucaucccacug

SEQ ID NO: 5193 - RNA, 22 nt, Artificial Sequence
  Antisense oligonucleotide
  misc_feature (1)..(1): BNA scaffold modification
  misc_feature (20)..(20): BNA scaffold modification
  misc_feature (22)..(22): BNA scaffold modification
guucuuguacuucaucccacug

SEQ ID NO: 5194 - RNA, 22 nt, Artificial Sequence
  Antisense oligonucleotide
  misc_feature (1)..(1): BNA scaffold modification
  misc_feature (7)..(7): BNA scaffold modification
  misc_feature (13)..(13): BNA scaffold modification
  misc_feature (22)..(22): BNA scaffold modification
guucuuguacuucaucccacug

SEQ ID NO: 5195 - RNA, 22 nt, Artificial Sequence
  Antisense oligonucleotide
  misc_feature (1)..(1): BNA scaffold modification
  misc_feature (4)..(4): BNA scaffold modification
  misc_feature (10)..(10): BNA scaffold modification
  misc_feature (22)..(22): BNA scaffold modification
guucuuguacuucaucccacug

SEQ ID NO: 5196 - RNA, 22 nt, Artificial Sequence
  Antisense oligonucleotide
  misc_feature (1)..(1): BNA scaffold modification
  misc_feature (10)..(10): BNA scaffold modification
  misc_feature (20)..(20): BNA scaffold modification
  misc_feature (22)..(22): BNA scaffold modification
guucuuguacuucaucccacug

SEQ ID NO: 5197 - RNA, 22 nt, Artificial Sequence
  Antisense oligonucleotide
  misc_feature (1)..(1): BNA scaffold modification
  misc_feature (7)..(7): BNA scaffold modification
  misc_feature (13)..(13): BNA scaffold modification
  misc_feature (21)..(22): BNA scaffold modification
guucuuguacuucaucccactg

SEQ ID NO: 5198 - RNA, 22 nt, Artificial Sequence
  Antisense oligonucleotide
  misc_feature (1)..(2): BNA scaffold modification
  misc_feature (21)..(22): BNA scaffold modification
gtucuuguacuucaucccactg

SEQ ID NO: 5199 - RNA, 22 nt, Artificial Sequence
  Antisense oligonucleotide
  misc_feature (1)..(2): BNA scaffold modification
  misc_feature (4)..(4): BNA scaffold modification
  misc_feature (13)..(13): BNA scaffold modification
  misc_feature (21)..(22): BNA scaffold modification
gtucuuguacuucaucccactg

SEQ ID NO: 5200 - RNA, 22 nt, Artificial Sequence
  Antisense oligonucleotide
  misc_feature (1)..(2): BNA scaffold modification
  misc_feature (10)..(10): BNA scaffold modification
  misc_feature (21)..(22): BNA scaffold modification
gtucuuguacuucaucccactg

SEQ ID NO: 5201 - RNA, 22 nt, Artificial Sequence
  Antisense oligonucleotide
  misc_feature (1)..(1): BNA scaffold modification
  misc_feature (22)..(22): BNA scaffold modification
tucuuguacuucaucccacuga

SEQ ID NO: 5202 - RNA, 22 nt, Artificial Sequence
  Antisense oligonucleotide
  misc_feature (1)..(1): BNA scaffold modification
  misc_feature (3)..(3): BNA scaffold modification
  misc_feature (22)..(22): BNA scaffold modification
tucuuguacuucaucccacuga

SEQ ID NO: 5203 - RNA, 22 nt, Artificial Sequence
  Antisense oligonucleotide
  misc_feature (1)..(1): BNA scaffold modification
  misc_feature (6)..(6): BNA scaffold modification
  misc_feature (22)..(22): BNA scaffold modification
tucuuguacuucaucccacuga

SEQ ID NO: 5204 - RNA, 22 nt, Artificial Sequence
  Antisense oligonucleotide
  misc_feature (1)..(1): BNA scaffold modification
  misc_feature (9)..(9): BNA scaffold modification
  misc_feature (22)..(22): BNA scaffold modification
tucuuguacuucaucccacuga

SEQ ID NO: 5205 - RNA, 22 nt, Artificial Sequence
  Antisense oligonucleotide
  misc_feature (1)..(1): BNA scaffold modification
  misc_feature (12)..(12): BNA scaffold modification
  misc_feature (22)..(22): BNA scaffold modification
tucuuguacuucaucccacuga

SEQ ID NO: 5206 - RNA, 22 nt, Artificial Sequence
  Antisense oligonucleotide
  misc_feature (1)..(1): BNA scaffold modification
  misc_feature (19)..(19): BNA scaffold modification
  misc_feature (22)..(22): BNA scaffold modification
tucuuguacuucaucccacuga

SEQ ID NO: 5207 - RNA, 22 nt, Artificial Sequence
  Antisense oligonucleotide
  misc_feature (1)..(1): BNA scaffold modification
  misc_feature (3)..(3): BNA scaffold modification
  misc_feature (9)..(9): BNA scaffold modification
  misc_feature (22)..(22): BNA scaffold modification
tucuuguacuucaucccacuga

SEQ ID NO: 5208 - RNA, 22 nt, Artificial Sequence
  Antisense oligonucleotide
  misc_feature (1)..(1): BNA scaffold modification
  misc_feature (6)..(6): BNA scaffold modification
  misc_feature (12)..(12): BNA scaffold modification
  misc_feature (22)..(22): BNA scaffold modification
tucuuguacuucaucccacuga

SEQ ID NO: 5209 - RNA, 22 nt, Artificial Sequence
  Antisense oligonucleotide
  misc_feature (1)..(1): BNA scaffold modification
  misc_feature (6)..(6): BNA scaffold modification
  misc_feature (19)..(19): BNA scaffold modification
  misc_feature (22)..(22): BNA scaffold modification
tucuuguacuucaucccacuga

SEQ ID NO: 5210 - RNA, 22 nt, Artificial Sequence
  Antisense oligonucleotide
  misc_feature (1)..(1): BNA scaffold modification
  misc_feature (9)..(9): BNA scaffold modification
  misc_feature (12)..(12): BNA scaffold modification
  misc_feature (21)..(22): BNA scaffold modification
tucuuguacuucaucccacuga

SEQ ID NO: 5211 - RNA, 22 nt, Artificial Sequence
  Antisense oligonucleotide
  misc_feature (1)..(2): BNA scaffold modification
  misc_feature (21)..(22): BNA scaffold modification
ttcuuguacuucaucccacuga

SEQ ID NO: 5212 - RNA, 22 nt, Artificial Sequence
  Antisense oligonucleotide
  misc_feature (1)..(2): BNA scaffold modification
  misc_feature (6)..(6): BNA scaffold modification
  misc_feature (19)..(19): BNA scaffold modification
  misc_feature (21)..(22): BNA scaffold modification
ttcuuguacuucaucccacuga

SEQ ID NO: 5213 - RNA, 22 nt, Artificial Sequence
  Antisense oligonucleotide
  misc_feature (1)..(2): BNA scaffold modification
  misc_feature (6)..(6): BNA scaffold modification
  misc_feature (21)..(22): BNA scaffold modification
ttcuuguacuucaucccacuga

SEQ ID NO: 5214 - RNA, 22 nt, Artificial Sequence
  Antisense oligonucleotide
  misc_feature (1)..(1): BNA scaffold modification
  misc_feature (22)..(22): BNA scaffold modification
tcuuguacuucaucccacugat

SEQ ID NO: 5215 - RNA, 22 nt, Artificial Sequence
  Antisense oligonucleotide
  misc_feature (1)..(1): BNA scaffold modification
  misc_feature (5)..(5): BNA scaffold modification
  misc_feature (22)..(22): BNA scaffold modification
tcuuguacuucaucccacugat

SEQ ID NO: 5216 - RNA, 22 nt, Artificial Sequence
  Antisense oligonucleotide
  misc_feature (1)..(1): BNA scaffold modification
  misc_feature (8)..(8): BNA scaffold modification
  misc_feature (22)..(22): BNA scaffold modification
tcuuguacuucaucccacugat

SEQ ID NO: 5217 - RNA, 22 nt, Artificial Sequence
  Antisense oligonucleotide
  misc_feature (1)..(1): BNA scaffold modification
  misc_feature (11)..(11): BNA scaffold modification
  misc_feature (22)..(22): BNA scaffold modification
tcuuguacuucaucccacugat

SEQ ID NO: 5218 - RNA, 22 nt, Artificial Sequence
  Antisense oligonucleotide
  misc_feature (1)..(1): BNA scaffold modification
  misc_feature (18)..(18): BNA scaffold modification
  misc_feature (22)..(22): BNA scaffold modification
tcuuguacuucaucccacugat

SEQ ID NO: 5219 - RNA, 22 nt, Artificial Sequence
  Antisense oligonucleotide
  misc_feature (1)..(1): BNA scaffold modification
  misc_feature (20)..(20): BNA scaffold modification
  misc_feature (22)..(22): BNA scaffold modification
tcuuguacuucaucccacugat

SEQ ID NO: 5220 - RNA, 22 nt, Artificial Sequence
  Antisense oligonucleotide
  misc_feature (1)..(1): BNA scaffold modification
  misc_feature (5)..(5): BNA scaffold modification
  misc_feature (20)..(20): BNA scaffold modification
  misc_feature (22)..(22): BNA scaffold modification
tcuuguacuucaucccacugat

SEQ ID NO: 5221 - RNA, 22 nt, Artificial Sequence
  Antisense oligonucleotide
  misc_feature (1)..(1): BNA scaffold modification
  misc_feature (8)..(8): BNA scaffold modification
  misc_feature (18)..(18): BNA scaffold modification
  misc_feature (22)..(22): BNA scaffold modification
tcuuguacuucaucccacugat

SEQ ID NO: 5222 - RNA, 22 nt, Artificial Sequence
  Antisense oligonucleotide
  misc_feature (1)..(1): BNA scaffold modification
  misc_feature (5)..(5): BNA scaffold modification
  misc_feature (11)..(11): BNA scaffold modification
  misc_feature (22)..(22): BNA scaffold modification
tcuuguacuucaucccacugat

SEQ ID NO: 5223 - RNA, 22 nt, Artificial Sequence
  Antisense oligonucleotide
  misc_feature (1)..(2): BNA scaffold modification
  misc_feature (21)..(22): BNA scaffold modification
tcuuguacuucaucccacugat

SEQ ID NO: 5224 - RNA, 22 nt, Artificial Sequence
  Antisense oligonucleotide
  misc_feature (1)..(1): BNA scaffold modification
  misc_feature (5)..(5): BNA scaffold modification
  misc_feature (11)..(11): BNA scaffold modification
  misc_feature (21)..(22): BNA scaffold modification
tcuuguacuucaucccacugat

SEQ ID NO: 5225 - RNA, 22 nt, Artificial Sequence
  Antisense oligonucleotide
  misc_feature (1)..(2): BNA scaffold modification
  misc_feature (5)..(5): BNA scaffold modification
  misc_feature (22)..(22): BNA scaffold modification
tcuuguacuucaucccacugat

SEQ ID NO: 5226 - RNA, 22 nt, Artificial Sequence
  Antisense oligonucleotide
  misc_feature (1)..(2): BNA scaffold modification
  misc_feature (8)..(8): BNA scaffold modification
  misc_feature (11)..(11): BNA scaffold modification
  misc_feature (21)..(22): BNA scaffold modification
tcuuguacuucaucccacugat

SEQ ID NO: 5227 - RNA, 20 nt, Artificial Sequence
  Antisense oligonucleotide
  misc_feature (1)..(1): BNA scaffold modification
  misc_feature (20)..(20): BNA scaffold modification
guucuuguacuucaucccac

SEQ ID NO: 5228 - RNA, 20 nt, Artificial Sequence
  Antisense oligonucleotide
  misc_feature (1)..(1): BNA scaffold modification
  misc_feature (4)..(4): BNA scaffold modification
  misc_feature (20)..(20): BNA scaffold modification
guucuuguacuucaucccac

SEQ ID NO: 5229 - RNA, 20 nt, Artificial Sequence
  Antisense oligonucleotide
  misc_feature (1)..(1): BNA scaffold modification
  misc_feature (7)..(7): BNA scaffold modification
  misc_feature (20)..(20): BNA scaffold modification
guucuuguacuucaucccac

SEQ ID NO: 5230 - RNA, 20 nt, Artificial Sequence
  Antisense oligonucleotide
  misc_feature (1)..(1): BNA scaffold modification
  misc_feature (10)..(10): BNA scaffold modification
  misc_feature (20)..(20): BNA scaffold modification
guucuuguacuucaucccac

SEQ ID NO: 5231 - RNA, 20 nt, Artificial Sequence
  Antisense oligonucleotide
  misc_feature (1)..(1): BNA scaffold modification
  misc_feature (13)..(13): BNA scaffold modification
  misc_feature (20)..(20): BNA scaffold modification
guucuuguacuucaucccac

SEQ ID NO: 5232 - RNA, 20 nt, Artificial Sequence
  Antisense oligonucleotide
  misc_feature (1)..(1): BNA scaffold modification
  misc_feature (4)..(4): BNA scaffold modification
  misc_feature (10)..(10): BNA scaffold modification
  misc_feature (20)..(20): BNA scaffold modification
guucuuguacuucaucccac

SEQ ID NO: 5233 - RNA, 20 nt, Artificial Sequence
  Antisense oligonucleotide
  misc_feature (1)..(1): BNA scaffold modification
  misc_feature (7)..(7): BNA scaffold modification
  misc_feature (13)..(13): BNA scaffold modification
  misc_feature (20)..(20): BNA scaffold modification
guucuuguacuucaucccac

SEQ ID NO: 5234 - RNA, 20 nt, Artificial Sequence
  Antisense oligonucleotide
  misc_feature (1)..(1): BNA scaffold modification
  misc_feature (4)..(4): BNA scaffold modification
  misc_feature (13)..(13): BNA scaffold modification
  misc_feature (20)..(20): BNA scaffold modification
guucuuguacuucaucccac

SEQ ID NO: 5235 - RNA, 20 nt, Artificial Sequence
  Antisense oligonucleotide
  misc_feature (1)..(2): BNA scaffold modification
  misc_feature (19)..(20): BNA scaffold modification
gtucuuguacuucaucccac

SEQ ID NO: 5236 - RNA, 20 nt, Artificial Sequence
  Antisense oligonucleotide
  misc_feature (1)..(2): BNA scaffold modification
  misc_feature (7)..(7): BNA scaffold modification
  misc_feature (13)..(13): BNA scaffold modification
  misc_feature (19)..(20): BNA scaffold modification
gtucuuguacuucaucccac

SEQ ID NO: 5237 - RNA, 20 nt, Artificial Sequence
  Antisense oligonucleotide
  misc_feature (1)..(1): BNA scaffold modification
  misc_feature (4)..(4): BNA scaffold modification
  misc_feature (7)..(7): BNA scaffold modification
  misc_feature (13)..(13): BNA scaffold modification
  misc_feature (19)..(20): BNA scaffold modification
guucuuguacuucaucccac

SEQ ID NO: 5238 - RNA, 20 nt, Artificial Sequence
  Antisense oligonucleotide
  misc_feature (1)..(1): BNA scaffold modification
  misc_feature (20)..(20): BNA scaffold modification
tucuuguacuucaucccact

SEQ ID NO: 5239 - RNA, 20 nt, Artificial Sequence
  Antisense oligonucleotide
  misc_feature (1)..(1): BNA scaffold modification
  misc_feature (3)..(3): BNA scaffold modification
  misc_feature (20)..(20): BNA scaffold modification
tucuuguacuucaucccact

SEQ ID NO: 5240 - RNA, 20 nt, Artificial Sequence
  Antisense oligonucleotide
  misc_feature (1)..(1): BNA scaffold modification
  misc_feature (6)..(6): BNA scaffold modification
  misc_feature (20)..(20): BNA scaffold modification
tucuuguacuucaucccact

SEQ ID NO: 5241 - RNA, 20 nt, Artificial Sequence
  Antisense oligonucleotide
  misc_feature (1)..(1): BNA scaffold modification
  misc_feature (9)..(9): BNA scaffold modification
  misc_feature (20)..(20): BNA scaffold modification
tucuuguacuucaucccact

SEQ ID NO: 5242 - RNA, 20 nt, Artificial Sequence
  Antisense oligonucleotide
  misc_feature (1)..(1): BNA scaffold modification
  misc_feature (12)..(12): BNA scaffold modification
  misc_feature (20)..(20): BNA scaffold modification
tucuuguacuucaucccact

SEQ ID NO: 5243 - RNA, 20 nt, Artificial Sequence
  Antisense oligonucleotide
  misc_feature (1)..(1): BNA scaffold modification
  misc_feature (19)..(20): BNA scaffold modification
tucuuguacuucaucccact

SEQ ID NO: 5244 - RNA, 20 nt, Artificial Sequence
  Antisense oligonucleotide
  misc_feature (1)..(1): BNA scaffold modification
  misc_feature (6)..(6): BNA scaffold modification
  misc_feature (19)..(20): BNA scaffold modification
tucuuguacuucaucccact

SEQ ID NO: 5245 - RNA, 20 nt, Artificial Sequence
  Antisense oligonucleotide
  misc_feature (1)..(1): BNA scaffold modification
  misc_feature (3)..(3): BNA scaffold modification
  misc_feature (12)..(12): BNA scaffold modification
  misc_feature (20)..(20): BNA scaffold modification
tucuuguacuucaucccact

SEQ ID NO: 5246 - RNA, 20 nt, Artificial Sequence
  Antisense oligonucleotide
  misc_feature (1)..(1): BNA scaffold modification
  misc_feature (3)..(3): BNA scaffold modification
  misc_feature (12)..(12): BNA scaffold modification
  misc_feature (19)..(20): BNA scaffold modification
tucuuguacuucaucccact

SEQ ID NO: 5247 - RNA, 20 nt, Artificial Sequence
  Antisense oligonucleotide
  misc_feature (1)..(2): BNA scaffold modification
  misc_feature (19)..(20): BNA scaffold modification
ttcuuguacuucaucccact

SEQ ID NO: 5248 - RNA, 20 nt, Artificial Sequence
  Antisense oligonucleotide
  misc_feature (1)..(2): BNA scaffold modification
  misc_feature (6)..(6): BNA scaffold modification
  misc_feature (12)..(12): BNA scaffold modification
  misc_feature (19)..(20): BNA scaffold modification
ttcuuguacuucaucccact

SEQ ID NO: 5249 - RNA, 20 nt, Artificial Sequence
  Antisense oligonucleotide
  misc_feature (1)..(1): BNA scaffold modification
  misc_feature (20)..(20): BNA scaffold modification
tcuuguacuucaucccacug

SEQ ID NO: 5250 - RNA, 20 nt, Artificial Sequence
  Antisense oligonucleotide
  misc_feature (1)..(1): BNA scaffold modification
  misc_feature (5)..(5): BNA scaffold modification
  misc_feature (20)..(20): BNA scaffold modification
tcuuguacuucaucccacug

SEQ ID NO: 5251 - RNA, 20 nt, Artificial Sequence
  Antisense oligonucleotide
  misc_feature (1)..(1): BNA scaffold modification
  misc_feature (8)..(8): BNA scaffold modification
  misc_feature (20)..(20): BNA scaffold modification
tcuuguacuucaucccacug

SEQ ID NO: 5252 - RNA, 20 nt, Artificial Sequence
  Antisense oligonucleotide
  misc_feature (1)..(1): BNA scaffold modification
  misc_feature (11)..(11): BNA scaffold modification
  misc_feature (20)..(20): BNA scaffold modification
tcuuguacuucaucccacug

SEQ ID NO: 5253 - RNA, 20 nt, Artificial Sequence
  Antisense oligonucleotide
  misc_feature (1)..(1): BNA scaffold modification
  misc_feature (18)..(18): BNA scaffold modification
  misc_feature (20)..(20): BNA scaffold modification
tcuuguacuucaucccacug

SEQ ID NO: 5254 - RNA, 20 nt, Artificial Sequence
  Antisense oligonucleotide
  misc_feature (1)..(1): BNA scaffold modification
  misc_feature (11)..(11): BNA scaffold modification
  misc_feature (19)..(20): BNA scaffold modification
tcuuguacuucaucccactg

SEQ ID NO: 5255 - RNA, 20 nt, Artificial Sequence
  Antisense oligonucleotide
  misc_feature (1)..(1): BNA scaffold modification
  misc_feature (5)..(5): BNA scaffold modification
  misc_feature (11)..(11): BNA scaffold modification
  misc_feature (20)..(20): BNA scaffold modification
tcuuguacuucaucccacug

SEQ ID NO: 5256 - RNA, 20 nt, Artificial Sequence
  Antisense oligonucleotide
  misc_feature (1)..(1): BNA scaffold modification
  misc_feature (5)..(5): BNA scaffold modification
  misc_feature (18)..(18): BNA scaffold modification
  misc_feature (20)..(20): BNA scaffold modification
tcuuguacuucaucccacug

SEQ ID NO: 5257 - RNA, 20 nt, Artificial Sequence
  Antisense oligonucleotide
  misc_feature (1)..(2): BNA scaffold modification
  misc_feature (19)..(20): BNA scaffold modification
tcuuguacuucaucccactg

SEQ ID NO: 5258 - RNA, 20 nt, Artificial Sequence
  Antisense oligonucleotide
  misc_feature (1)..(1): BNA scaffold modification
  misc_feature (5)..(5): BNA scaffold modification
  misc_feature (11)..(11): BNA scaffold modification
  misc_feature (19)..(20): BNA scaffold modification
tcuuguacuucaucccactg

SEQ ID NO: 5259 - RNA, 20 nt, Artificial Sequence
  Antisense oligonucleotide
  misc_feature (1)..(1): BNA scaffold modification
  misc_feature (8)..(8): BNA scaffold modification
  misc_feature (18)..(20): BNA scaffold modification
tcuuguacuucaucccactg

SEQ ID NO: 5260 - RNA, 20 nt, Artificial Sequence
  Antisense oligonucleotide
  misc_feature (1)..(1): BNA scaffold modification
  misc_feature (20)..(20): BNA scaffold modification
cuuguacuucaucccacuga

SEQ ID NO: 5261 - RNA, 20 nt, Artificial Sequence
  Antisense oligonucleotide
  misc_feature (1)..(1): BNA scaffold modification
  misc_feature (4)..(4): BNA scaffold modification
  misc_feature (20)..(20): BNA scaffold modification
cuuguacuucaucccacuga

SEQ ID NO: 5262 - RNA, 20 nt, Artificial Sequence
  Antisense oligonucleotide
  misc_feature (1)..(1): BNA scaffold modification
  misc_feature (7)..(7): BNA scaffold modification
  misc_feature (20)..(20): BNA scaffold modification
cuuguacuucaucccacuga

SEQ ID NO: 5263 - RNA, 20 nt, Artificial Sequence
  Antisense oligonucleotide
  misc_feature (1)..(1): BNA scaffold modification
  misc_feature (10)..(10): BNA scaffold modification
  misc_feature (20)..(20): BNA scaffold modification
cuuguacuucaucccacuga

SEQ ID NO: 5264 - RNA, 20 nt, Artificial Sequence
  Antisense oligonucleotide
  misc_feature (1)..(1): BNA scaffold modification
  misc_feature (17)..(17): BNA scaffold modification
  misc_feature (20)..(20): BNA scaffold modification
cuuguacuucaucccacuga

SEQ ID NO: 5265 - RNA, 20 nt, Artificial Sequence
  Antisense oligonucleotide
  misc_feature (1)..(1): BNA scaffold modification
  misc_feature (4)..(4): BNA scaffold modification
  misc_feature (10)..(10): BNA scaffold modification
  misc_feature (20)..(20): BNA scaffold modification
cuuguacuucaucccacuga

SEQ ID NO: 5266 - RNA, 20 nt, Artificial Sequence
  Antisense oligonucleotide
  misc_feature (1)..(1): BNA scaffold modification
  misc_feature (7)..(7): BNA scaffold modification
  misc_feature (17)..(17): BNA scaffold modification
  misc_feature (20)..(20): BNA scaffold modification
cuuguacuucaucccacuga

SEQ ID NO: 5267 - RNA, 20 nt, Artificial Sequence
  Antisense oligonucleotide
  misc_feature (1)..(1): BNA scaffold modification
  misc_feature (4)..(4): BNA scaffold modification
  misc_feature (19)..(20): BNA scaffold modification
cuuguacuucaucccacuga

SEQ ID NO: 5268 - RNA, 20 nt, Artificial Sequence
  Antisense oligonucleotide
  misc_feature (1)..(2): BNA scaffold modification
  misc_feature (19)..(20): BNA scaffold modification
ctuguacuucaucccacuga

SEQ ID NO: 5269 - RNA, 20 nt, Artificial Sequence
  Antisense oligonucleotide
  misc_feature (1)..(1): BNA scaffold modification
  misc_feature (10)..(10): BNA scaffold modification
  misc_feature (19)..(20): BNA scaffold modification
cuuguacuucaucccacuga

SEQ ID NO: 5270 - RNA, 20 nt, Artificial Sequence
  Antisense oligonucleotide
  misc_feature (1)..(2): BNA scaffold modification
  misc_feature (7)..(7): BNA scaffold modification
  misc_feature (17)..(17): BNA scaffold modification
  misc_feature (19)..(20): BNA scaffold modification
ctuguacuucaucccacuga

SEQ ID NO: 5271 - RNA, 20 nt, Artificial Sequence
  Antisense oligonucleotide
  misc_feature (1)..(1): BNA scaffold modification
  misc_feature (20)..(20): BNA scaffold modification
tuguacuucaucccacugat

SEQ ID NO: 5272 - RNA, 20 nt, Artificial Sequence
  Antisense oligonucleotide
  misc_feature (1)..(1): BNA scaffold modification
  misc_feature (3)..(3): BNA scaffold modification
  misc_feature (20)..(20): BNA scaffold modification
tuguacuucaucccacugat

SEQ ID NO: 5273 - RNA, 20 nt, Artificial Sequence
  Antisense oligonucleotide
  misc_feature (1)..(1): BNA scaffold modification
  misc_feature (6)..(6): BNA scaffold modification
  misc_feature (20)..(20): BNA scaffold modification
tuguacuucaucccacugat

SEQ ID NO: 5274 - RNA, 20 nt, Artificial Sequence
  Antisense oligonucleotide
  misc_feature (1)..(1): BNA scaffold modification
  misc_feature (9)..(9): BNA scaffold modification
  misc_feature (20)..(20): BNA scaffold modification
tuguacuucaucccacugat

SEQ ID NO: 5275 - RNA, 20 nt, Artificial Sequence
  Antisense oligonucleotide
  misc_feature (1)..(1): BNA scaffold modification
  misc_feature (16)..(16): BNA scaffold modification
  misc_feature (20)..(20): BNA scaffold modification
tuguacuucaucccacugat

SEQ ID NO: 5276 - RNA, 20 nt, Artificial Sequence
  Antisense oligonucleotide
  misc_feature (1)..(1): BNA scaffold modification
  misc_feature (18)..(18): BNA scaffold modification
  misc_feature (20)..(20): BNA scaffold modification
tuguacuucaucccacugat

SEQ ID NO: 5277 - RNA, 20 nt, Artificial Sequence
  Antisense oligonucleotide
  misc_feature (1)..(1): BNA scaffold modification
  misc_feature (3)..(3): BNA scaffold modification
  misc_feature (18)..(18): BNA scaffold modification
  misc_feature (20)..(20): BNA scaffold modification
tuguacuucaucccacugat

SEQ ID NO: 5278 - RNA, 20 nt, Artificial Sequence
  Antisense oligonucleotide
  misc_feature (1)..(1): BNA scaffold modification
  misc_feature (6)..(6): BNA scaffold modification
  misc_feature (16)..(16): BNA scaffold modification
  misc_feature (20)..(20): BNA scaffold modification
tuguacuucaucccacugat

SEQ ID NO: 5279 - RNA, 20 nt, Artificial Sequence
  Antisense oligonucleotide
  misc_feature (1)..(1): BNA scaffold modification
  misc_feature (9)..(9): BNA scaffold modification
  misc_feature (16)..(16): BNA scaffold modification
  misc_feature (20)..(20): BNA scaffold modification
tuguacuucaucccacugat

SEQ ID NO: 5280 - RNA, 20 nt, Artificial Sequence
  Antisense oligonucleotide
  misc_feature (1)..(2): BNA scaffold modification
  misc_feature (19)..(20): BNA scaffold modification
ttguacuucaucccacugat

SEQ ID NO: 5281 - RNA, 20 nt, Artificial Sequence
  Antisense oligonucleotide
  misc_feature (1)..(1): BNA scaffold modification
  misc_feature (3)..(3): BNA scaffold modification
  misc_feature (9)..(9): BNA scaffold modification
  misc_feature (18)..(18): BNA scaffold modification
  misc_feature (20)..(20): BNA scaffold modification
tuguacuucaucccacugat

SEQ ID NO: 5282 - RNA, 18 nt, Artificial Sequence
  Antisense oligonucleotide
  misc_feature (1)..(1): BNA scaffold modification
  misc_feature (18)..(18): BNA scaffold modification
guucuuguacuucauccc

SEQ ID NO: 5283 - RNA, 18 nt, Artificial Sequence
  Antisense oligonucleotide
  misc_feature (1)..(1): BNA scaffold modification
  misc_feature (4)..(4): BNA scaffold modification
  misc_feature (18)..(18): BNA scaffold modification
guucuuguacuucauccc

SEQ ID NO: 5284 - RNA, 18 nt, Artificial Sequence
  Antisense oligonucleotide
  misc_feature (1)..(1): BNA scaffold modification
  misc_feature (7)..(7): BNA scaffold modification
  misc_feature (18)..(18): BNA scaffold modification
guucuuguacuucauccc

SEQ ID NO: 5285 - RNA, 18 nt, Artificial Sequence
  Antisense oligonucleotide
  misc_feature (1)..(1): BNA scaffold modification
  misc_feature (10)..(10): BNA scaffold modification
  misc_feature (18)..(18): BNA scaffold modification
guucuuguacuucauccc

SEQ ID NO: 5286 - RNA, 18 nt, Artificial Sequence
  Antisense oligonucleotide
  misc_feature (1)..(1): BNA scaffold modification
  misc_feature (13)..(13): BNA scaffold modification
  misc_feature (18)..(18): BNA scaffold modification
guucuuguacuucauccc

SEQ ID NO: 5287 - RNA, 18 nt, Artificial Sequence
  Antisense oligonucleotide
  misc_feature (1)..(1): BNA scaffold modification
  misc_feature (7)..(7): BNA scaffold modification
  misc_feature (13)..(13): BNA scaffold modification
  misc_feature (18)..(18): BNA scaffold modification
guucuuguacuucauccc

SEQ ID NO: 5288 - RNA, 18 nt, Artificial Sequence
  Antisense oligonucleotide
  misc_feature (1)..(1): BNA scaffold modification
  misc_feature (4)..(4): BNA scaffold modification
  misc_feature (10)..(10): BNA scaffold modification
  misc_feature (18)..(18): BNA scaffold modification
guucuuguacuucauccc

SEQ ID NO: 5289 - RNA, 18 nt, Artificial Sequence
  Antisense oligonucleotide
  misc_feature (1)..(1): BNA scaffold modification
  misc_feature (4)..(4): BNA scaffold modification
  misc_feature (7)..(7): BNA scaffold modification
  misc_feature (10)..(10): BNA scaffold modification
  misc_feature (13)..(13): BNA scaffold modification
  misc_feature (18)..(18): BNA scaffold modification
guucuuguacuucauccc

SEQ ID NO: 5290 - RNA, 18 nt, Artificial Sequence
  Antisense oligonucleotide
  misc_feature (1)..(1): BNA scaffold modification
  misc_feature (17)..(18): BNA scaffold modification
guucuuguacuucauccc

SEQ ID NO: 5291 - RNA, 18 nt, Artificial Sequence
  Antisense oligonucleotide
  misc_feature (1)..(2): BNA scaffold modification
  misc_feature (17)..(18): BNA scaffold modification
gtucuuguacuucauccc

SEQ ID NO: 5292 - RNA, 18 nt, Artificial Sequence
  Antisense oligonucleotide
  misc_feature (1)..(2): BNA scaffold modification
  misc_feature (7)..(7): BNA scaffold modification
  misc_feature (13)..(13): BNA scaffold modification
  misc_feature (17)..(18): BNA scaffold modification
gtucuuguacuucauccc

SEQ ID NO: 5293 - RNA, 18 nt, Artificial Sequence
  Antisense oligonucleotide
  misc_feature (1)..(1): BNA scaffold modification
  misc_feature (18)..(18): BNA scaffold modification
tucuuguacuucauccca

SEQ ID NO: 5294 - RNA, 18 nt, Artificial Sequence
  Antisense oligonucleotide
  misc_feature (1)..(1): BNA scaffold modification
  misc_feature (3)..(3): BNA scaffold modification
  misc_feature (18)..(18): BNA scaffold modification
tucuuguacuucauccca

SEQ ID NO: 5295 - RNA, 18 nt, Artificial Sequence
  Antisense oligonucleotide
  misc_feature (1)..(1): BNA scaffold modification
  misc_feature (6)..(6): BNA scaffold modification
  misc_feature (18)..(18): BNA scaffold modification
tucuuguacuucauccca

SEQ ID NO: 5296 - RNA, 18 nt, Artificial Sequence
  Antisense oligonucleotide
  misc_feature (1)..(1): BNA scaffold modification
  misc_feature (9)..(9): BNA scaffold modification
  misc_feature (18)..(18): BNA scaffold modification
tucuuguacuucauccca

SEQ ID NO: 5297 - RNA, 18 nt, Artificial Sequence
  Antisense oligonucleotide
  misc_feature (1)..(1): BNA scaffold modification
  misc_feature (12)..(12): BNA scaffold modification
  misc_feature (18)..(18): BNA scaffold modification
tucuuguacuucauccca

SEQ ID NO: 5298 - RNA, 18 nt, Artificial Sequence
  Antisense oligonucleotide
  misc_feature (1)..(1): BNA scaffold modification
  misc_feature (3)..(3): BNA scaffold modification
  misc_feature (12)..(12): BNA scaffold modification
  misc_feature (18)..(18): BNA scaffold modification
tucuuguacuucauccca

SEQ ID NO: 5299 - RNA, 18 nt, Artificial Sequence
  Antisense oligonucleotide
  misc_feature (1)..(1): BNA scaffold modification
  misc_feature (6)..(6): BNA scaffold modification
  misc_feature (12)..(12): BNA scaffold modification
  misc_feature (18)..(18): BNA scaffold modification
tucuuguacuucauccca

SEQ ID NO: 5300 - RNA, 18 nt, Artificial Sequence
  Antisense oligonucleotide
  misc_feature (1)..(1): BNA scaffold modification
  misc_feature (3)..(3): BNA scaffold modification
  misc_feature (9)..(9): BNA scaffold modification
  misc_feature (18)..(18): BNA scaffold modification
tucuuguacuucauccca

SEQ ID NO: 5301 - RNA, 18 nt, Artificial Sequence
  Antisense oligonucleotide
  misc_feature (1)..(1): BNA scaffold modification
  misc_feature (6)..(6): BNA scaffold modification
  misc_feature (17)..(18): BNA scaffold modification
tucuuguacuucauccca

SEQ ID NO: 5302 - RNA, 18 nt, Artificial Sequence
  Antisense oligonucleotide
  misc_feature (1)..(2): BNA scaffold modification
  misc_feature (17)..(18): BNA scaffold modification
ttcuuguacuucauccca

SEQ ID NO: 5303 - RNA, 18 nt, Artificial Sequence
  Antisense oligonucleotide
  misc_feature (1)..(2): BNA scaffold modification
  misc_feature (6)..(6): BNA scaffold modification
  misc_feature (12)..(12): BNA scaffold modification
  misc_feature (17)..(18): BNA scaffold modification
tucuuguacuucauccca

SEQ ID NO: 5304 - RNA, 18 nt, Artificial Sequence
  Antisense oligonucleotide
  misc_feature (1)..(1): BNA scaffold modification
  misc_feature (18)..(18): BNA scaffold modification
tcuuguacuucaucccac

SEQ ID NO: 5305 - RNA, 18 nt, Artificial Sequence
  Antisense oligonucleotide
  misc_feature (1)..(1): BNA scaffold modification
  misc_feature (5)..(5): BNA scaffold modification
  misc_feature (18)..(18): BNA scaffold modification
tcuuguacuucaucccac

SEQ ID NO: 5306 - RNA, 18 nt, Artificial Sequence
  Antisense oligonucleotide
  misc_feature (1)..(1): BNA scaffold modification
  misc_feature (8)..(8): BNA scaffold modification
  misc_feature (18)..(18): BNA scaffold modification
tcuuguacuucaucccac

SEQ ID NO: 5307 - RNA, 18 nt, Artificial Sequence
  Antisense oligonucleotide
  misc_feature (1)..(1): BNA scaffold modification
  misc_feature (11)..(11): BNA scaffold modification
  misc_feature (18)..(18): BNA scaffold modification
tcuuguacuucaucccac

SEQ ID NO: 5308 - RNA, 18 nt, Artificial Sequence
  Antisense oligonucleotide
  misc_feature (1)..(1): BNA scaffold modification
  misc_feature (5)..(5): BNA scaffold modification
  misc_feature (11)..(11): BNA scaffold modification
  misc_feature (18)..(18): BNA scaffold modification
tcuuguacuucaucccac

SEQ ID NO: 5309 - RNA, 18 nt, Artificial Sequence
  Antisense oligonucleotide
  misc_feature (1)..(2): BNA scaffold modification
  misc_feature (18)..(18): BNA scaffold modification
tcuuguacuucaucccac

SEQ ID NO: 5310 - RNA, 18 nt, Artificial Sequence
  Antisense oligonucleotide
  misc_feature (1)..(2): BNA scaffold modification
  misc_feature (8)..(8): BNA scaffold modification
  misc_feature (18)..(18): BNA scaffold modification
tcuuguacuucaucccac

SEQ ID NO: 5311 - RNA, 18 nt, Artificial Sequence
  Antisense oligonucleotide
  misc_feature (1)..(2): BNA scaffold modification
  misc_feature (11)..(11): BNA scaffold modification
  misc_feature (18)..(18): BNA scaffold modification
tcuuguacuucaucccac

SEQ ID NO: 5312 - RNA, 18 nt, Artificial Sequence
  Antisense oligonucleotide
  misc_feature (1)..(1): BNA scaffold modification
  misc_feature (8)..(8): BNA scaffold modification
  misc_feature (17)..(18): BNA scaffold modification
tcuuguacuucaucccac

SEQ ID NO: 5313 - RNA, 18 nt, Artificial Sequence
  Antisense oligonucleotide
  misc_feature (1)..(2): BNA scaffold modification
  misc_feature (17)..(18): BNA scaffold modification
tcuuguacuucaucccac

SEQ ID NO: 5314 - RNA, 18 nt, Artificial Sequence
  Antisense oligonucleotide
  misc_feature (1)..(1): BNA scaffold modification
  misc_feature (5)..(5): BNA scaffold modification
  misc_feature (8)..(8): BNA scaffold modification
  misc_feature (11)..(11): BNA scaffold modification
  misc_feature (17)..(18): BNA scaffold modification
tcuuguacuucaucccac

SEQ ID NO: 5315 - RNA, 18 nt, Artificial Sequence
  Antisense oligonucleotide
  misc_feature (1)..(1): BNA scaffold modification
  misc_feature (18)..(18): BNA scaffold modification
cuuguacuucaucccact

SEQ ID NO: 5316 - RNA, 18 nt, Artificial Sequence
  Antisense oligonucleotide
  misc_feature (1)..(1): BNA scaffold modification
  misc_feature (4)..(4): BNA scaffold modification
  misc_feature (18)..(18): BNA scaffold modification
cuuguacuucaucccact

SEQ ID NO: 5317 - RNA, 18 nt, Artificial Sequence
  Antisense oligonucleotide
  misc_feature (1)..(1): BNA scaffold modification
  misc_feature (7)..(7): BNA scaffold modification
  misc_feature (18)..(18): BNA scaffold modification
cuuguacuucaucccact

SEQ ID NO: 5318 - RNA, 18 nt, Artificial Sequence
  Antisense oligonucleotide
  misc_feature (1)..(1): BNA scaffold modification
  misc_feature (10)..(10): BNA scaffold modification
  misc_feature (18)..(18): BNA scaffold modification
cuuguacuucaucccact

SEQ ID NO: 5319 - RNA, 18 nt, Artificial Sequence
  Antisense oligonucleotide
  misc_feature (1)..(1): BNA scaffold modification
  misc_feature (17)..(18): BNA scaffold modification
cuuguacuucaucccact

SEQ ID NO: 5320 - RNA, 18 nt, Artificial Sequence
  Antisense oligonucleotide
  misc_feature (1)..(1): BNA scaffold modification
  misc_feature (4)..(4): BNA scaffold modification
  misc_feature (10)..(10): BNA scaffold modification
  misc_feature (18)..(18): BNA scaffold modification
cuuguacuucaucccact

SEQ ID NO: 5321 - RNA, 18 nt, Artificial Sequence
  Antisense oligonucleotide
  misc_feature (1)..(1): BNA scaffold modification
  misc_feature (7)..(7): BNA scaffold modification
  misc_feature (17)..(18): BNA scaffold modification
cuuguacuucaucccact

SEQ ID NO: 5322 - RNA, 18 nt, Artificial Sequence
  Antisense oligonucleotide
  misc_feature (1)..(2): BNA scaffold modification
  misc_feature (17)..(18): BNA scaffold modification
ctuguacuucaucccact

SEQ ID NO: 5323 - RNA, 18 nt, Artificial Sequence
  Antisense oligonucleotide
  misc_feature (1)..(2): BNA scaffold modification
  misc_feature (7)..(7): BNA scaffold modification
  misc_feature (10)..(10): BNA scaffold modification
  misc_feature (17)..(18): BNA scaffold modification
ctuguacuucaucccact

SEQ ID NO: 5324 - RNA, 18 nt, Artificial Sequence
  Antisense oligonucleotide
  misc_feature (1)..(2): BNA scaffold modification
  misc_feature (4)..(4): BNA scaffold modification
  misc_feature (7)..(7): BNA scaffold modification
  misc_feature (10)..(10): BNA scaffold modification
  misc_feature (18)..(18): BNA scaffold modification
ctuguacuucaucccact

SEQ ID NO: 5325 - RNA, 18 nt, Artificial Sequence
  Antisense oligonucleotide
  misc_feature (1)..(1): BNA scaffold modification
  misc_feature (18)..(18): BNA scaffold modification
tuguacuucaucccacug

SEQ ID NO: 5326 - RNA, 18 nt, Artificial Sequence
  Antisense oligonucleotide
  misc_feature (1)..(1): BNA scaffold modification
  misc_feature (3)..(3): BNA scaffold modification
  misc_feature (18)..(18): BNA scaffold modification
tuguacuucaucccacug

SEQ ID NO: 5327 - RNA, 18 nt, Artificial Sequence
  Antisense oligonucleotide
  misc_feature (1)..(1): BNA scaffold modification
  misc_feature (6)..(6): BNA scaffold modification
  misc_feature (18)..(18): BNA scaffold modification
tuguacuucaucccacug

SEQ ID NO: 5328 - RNA, 18 nt, Artificial Sequence
  Antisense oligonucleotide
  misc_feature (1)..(1): BNA scaffold modification
  misc_feature (9)..(9): BNA scaffold modification
  misc_feature (18)..(18): BNA scaffold modification
tuguacuucaucccacug

SEQ ID NO: 5329 - RNA, 18 nt, Artificial Sequence
  Antisense oligonucleotide
  misc_feature (1)..(1): BNA scaffold modification
  misc_feature (16)..(16): BNA scaffold modification
  misc_feature (18)..(18): BNA scaffold modification
tuguacuucaucccacug

SEQ ID NO: 5330 - RNA, 18 nt, Artificial Sequence
  Antisense oligonucleotide
  misc_feature (1)..(1): BNA scaffold modification
  misc_feature (6)..(6): BNA scaffold modification
  misc_feature (16)..(16): BNA scaffold modification
  misc_feature (18)..(18): BNA scaffold modification
tuguacuucaucccacug

SEQ ID NO: 5331 - RNA, 18 nt, Artificial Sequence
  Antisense oligonucleotide
  misc_feature (1)..(1): BNA scaffold modification
  misc_feature (3)..(3): BNA scaffold modification
  misc_feature (16)..(16): BNA scaffold modification
  misc_feature (18)..(18): BNA scaffold modification
tuguacuucaucccacug

SEQ ID NO: 5332 - RNA, 18 nt, Artificial Sequence
  Antisense oligonucleotide
  misc_feature (1)..(1): BNA scaffold modification
  misc_feature (3)..(3): BNA scaffold modification
  misc_feature (9)..(9): BNA scaffold modification
  misc_feature (18)..(18): BNA scaffold modification
tuguacuucaucccacug

SEQ ID NO: 5333 - RNA, 18 nt, Artificial Sequence
  Antisense oligonucleotide
  misc_feature (1)..(1): BNA scaffold modification
  misc_feature (17)..(18): BNA scaffold modification
tuguacuucaucccactg

SEQ ID NO: 5334 - RNA, 18 nt, Artificial Sequence
  Antisense oligonucleotide
  misc_feature (1)..(2): BNA scaffold modification
  misc_feature (9)..(9): BNA scaffold modification
  misc_feature (17)..(18): BNA scaffold modification
ttguacuucaucccactg

SEQ ID NO: 5335 - RNA, 18 nt, Artificial Sequence
  Antisense oligonucleotide
  misc_feature (1)..(2): BNA scaffold modification
  misc_feature (6)..(6): BNA scaffold modification
  misc_feature (9)..(9): BNA scaffold modification
  misc_feature (17)..(18): BNA scaffold modification
ttguacuucaucccactg

SEQ ID NO: 5336 - RNA, 18 nt, Artificial Sequence
  Antisense oligonucleotide
  misc_feature (1)..(1): BNA scaffold modification
  misc_feature (18)..(18): BNA scaffold modification
tguacuucaucccacuga

SEQ ID NO: 5337 - RNA, 18 nt, Artificial Sequence
  Antisense oligonucleotide
  misc_feature (1)..(2): BNA scaffold modification
  misc_feature (18)..(18): BNA scaffold modification
tguacuucaucccacuga

SEQ ID NO: 5338 - RNA, 18 nt, Artificial Sequence
  Antisense oligonucleotide
  misc_feature (1)..(1): BNA scaffold modification
  misc_feature (5)..(5): BNA scaffold modification
  misc_feature (18)..(18): BNA scaffold modification
tguacuucaucccacuga

SEQ ID NO: 5339 - RNA, 18 nt, Artificial Sequence
  Antisense oligonucleotide
  misc_feature (1)..(1): BNA scaffold modification
  misc_feature (8)..(8): BNA scaffold modification
  misc_feature (18)..(18): BNA scaffold modification
tguacuucaucccacuga

SEQ ID NO: 5340 - RNA, 18 nt, Artificial Sequence
  Antisense oligonucleotide
  misc_feature (1)..(1): BNA scaffold modification
  misc_feature (15)..(15): BNA scaffold modification
  misc_feature (18)..(18): BNA scaffold modification
tguacuucaucccacuga

SEQ ID NO: 5341 - RNA, 18 nt, Artificial Sequence
  Antisense oligonucleotide
  misc_feature (1)..(1): BNA scaffold modification
  misc_feature (17)..(18): BNA scaffold modification
tguacuucaucccacuga

SEQ ID NO: 5342 - RNA, 18 nt, Artificial Sequence
  Antisense oligonucleotide
  misc_feature (1)..(1): BNA scaffold modification
  misc_feature (5)..(5): BNA scaffold modification
  misc_feature (15)..(15): BNA scaffold modification
  misc_feature (18)..(18): BNA scaffold modification
tguacuucaucccacuga

SEQ ID NO: 5343 - RNA, 18 nt, Artificial Sequence
  Antisense oligonucleotide
  misc_feature (1)..(1): BNA scaffold modification
  misc_feature (8)..(8): BNA scaffold modification
  misc_feature (15)..(15): BNA scaffold modification
  misc_feature (18)..(18): BNA scaffold modification
tguacuucaucccacuga

SEQ ID NO: 5344 - RNA, 18 nt, Artificial Sequence
  Antisense oligonucleotide
  misc_feature (1)..(2): BNA scaffold modification
  misc_feature (17)..(18): BNA scaffold modification
tguacuucaucccacuga

SEQ ID NO: 5345 - RNA, 18 nt, Artificial Sequence
  Antisense oligonucleotide
  misc_feature (1)..(2): BNA scaffold modification
  misc_feature (8)..(8): BNA scaffold modification
  misc_feature (17)..(18): BNA scaffold modification
tguacuucaucccacuga

SEQ ID NO: 5346 - RNA, 18 nt, Artificial Sequence
  Antisense oligonucleotide
  misc_feature (1)..(1): BNA scaffold modification
  misc_feature (5)..(5): BNA scaffold modification
  misc_feature (8)..(8): BNA scaffold modification
  misc_feature (15)..(15): BNA scaffold modification
  misc_feature (18)..(18): BNA scaffold modification
tguacuucaucccacuga

SEQ ID NO: 5347 - RNA, 18 nt, Artificial Sequence
  Antisense oligonucleotide
  misc_feature (1)..(1): BNA scaffold modification
  misc_feature (18)..(18): BNA scaffold modification
guacuucaucccacugat

SEQ ID NO: 5348 - RNA, 18 nt, Artificial Sequence
  Antisense oligonucleotide
  misc_feature (1)..(1): BNA scaffold modification
  misc_feature (4)..(4): BNA scaffold modification
  misc_feature (18)..(18): BNA scaffold modification
guacuucaucccacugat

SEQ ID NO: 5349 - RNA, 18 nt, Artificial Sequence
  Antisense oligonucleotide
  misc_feature (1)..(1): BNA scaffold modification
  misc_feature (7)..(7): BNA scaffold modification
  misc_feature (18)..(18): BNA scaffold modification
guacuucaucccacugat

SEQ ID NO: 5350 - RNA, 18 nt, Artificial Sequence
  Antisense oligonucleotide
  misc_feature (1)..(1): BNA scaffold modification
  misc_feature (14)..(14): BNA scaffold modification
  misc_feature (18)..(18): BNA scaffold modification
guacuucaucccacugat

SEQ ID NO: 5351 - RNA, 18 nt, Artificial Sequence
  Antisense oligonucleotide
  misc_feature (1)..(1): BNA scaffold modification
  misc_feature (16)..(16): BNA scaffold modification
  misc_feature (18)..(18): BNA scaffold modification
guacuucaucccacugat

SEQ ID NO: 5352 - RNA, 18 nt, Artificial Sequence
  Antisense oligonucleotide
  misc_feature (1)..(1): BNA scaffold modification
  misc_feature (4)..(4): BNA scaffold modification
  misc_feature (16)..(16): BNA scaffold modification
  misc_feature (18)..(18): BNA scaffold modification
guacuucaucccacugat

SEQ ID NO: 5353 - RNA, 18 nt, Artificial Sequence
  Antisense oligonucleotide
  misc_feature (1)..(1): BNA scaffold modification
  misc_feature (7)..(7): BNA scaffold modification
  misc_feature (14)..(14): BNA scaffold modification
  misc_feature (18)..(18): BNA scaffold modification
guacuucaucccacugat

SEQ ID NO: 5354 - RNA, 18 nt, Artificial Sequence
  Antisense oligonucleotide
  misc_feature (1)..(1): BNA scaffold modification
  misc_feature (7)..(7): BNA scaffold modification
  misc_feature (16)..(16): BNA scaffold modification
  misc_feature (18)..(18): BNA scaffold modification
guacuucaucccacugat

SEQ ID NO: 5355 - RNA, 18 nt, Artificial Sequence
  Antisense oligonucleotide
  misc_feature (1)..(1): BNA scaffold modification
  misc_feature (4)..(4): BNA scaffold modification
  misc_feature (7)..(7): BNA scaffold modification
  misc_feature (18)..(18): BNA scaffold modification
guacuucaucccacugat

SEQ ID NO: 5356 - RNA, 18 nt, Artificial Sequence
  Antisense oligonucleotide
  misc_feature (1)..(2): BNA scaffold modification
  misc_feature (17)..(18): BNA scaffold modification
gtacuucaucccacugat

SEQ ID NO: 5357 - RNA, 18 nt, Artificial Sequence
  Antisense oligonucleotide
  misc_feature (1)..(2): BNA scaffold modification
  misc_feature (10)..(12): BNA scaffold modification
  misc_feature (17)..(18): BNA scaffold modification
guacuucaucccacugat

SEQ ID NO: 5358 - RNA, 16 nt, Artificial Sequence
  Antisense oligonucleotide
  misc_feature (1)..(1): BNA scaffold modification
  misc_feature (16)..(16): BNA scaffold modification
guucuuguacuucauc

SEQ ID NO: 5359 - RNA, 16 nt, Artificial Sequence
  Antisense oligonucleotide
  misc_feature (1)..(1): BNA scaffold modification
  misc_feature (4)..(4): BNA scaffold modification
  misc_feature (16)..(16): BNA scaffold modification
guucuuguacuucauc

SEQ ID NO: 5360 - RNA, 16 nt, Artificial Sequence
  Antisense oligonucleotide
  misc_feature (1)..(1): BNA scaffold modification
  misc_feature (7)..(7): BNA scaffold modification
  misc_feature (16)..(16): BNA scaffold modification
guucuuguacuucauc

SEQ ID NO: 5361 - RNA, 16 nt, Artificial Sequence
  Antisense oligonucleotide
  misc_feature (1)..(1): BNA scaffold modification
  misc_feature (10)..(10): BNA scaffold modification
  misc_feature (16)..(16): BNA scaffold modification
guucuuguacuucauc

SEQ ID NO: 5362 - RNA, 16 nt, Artificial Sequence
  Antisense oligonucleotide
  misc_feature (1)..(1): BNA scaffold modification
  misc_feature (13)..(13): BNA scaffold modification
  misc_feature (16)..(16): BNA scaffold modification
guucuuguacuucauc

SEQ ID NO: 5363 - RNA, 16 nt, Artificial Sequence
  Antisense oligonucleotide
  misc_feature (1)..(1): BNA scaffold modification
  misc_feature (16)..(16): BNA scaffold modification
guucuuguacuucauc

SEQ ID NO: 5364 - RNA, 16 nt, Artificial Sequence
  Antisense oligonucleotide
  misc_feature (1)..(1): BNA scaffold modification
  misc_feature (4)..(4): BNA scaffold modification
  misc_feature (13)..(13): BNA scaffold modification
  misc_feature (16)..(16): BNA scaffold modification
guucuuguacuucauc

SEQ ID NO: 5365 - RNA, 16 nt, Artificial Sequence
  Antisense oligonucleotide
  misc_feature (1)..(1): BNA scaffold modification
  misc_feature (7)..(7): BNA scaffold modification
  misc_feature (13)..(13): BNA scaffold modification
  misc_feature (16)..(16): BNA scaffold modification
guucuuguacuucauc

SEQ ID NO: 5366 - RNA, 16 nt, Artificial Sequence
  Antisense oligonucleotide
  misc_feature (1)..(1): BNA scaffold modification
  misc_feature (4)..(4): BNA scaffold modification
  misc_feature (10)..(10): BNA scaffold modification
  misc_feature (16)..(16): BNA scaffold modification
guucuuguacuucauc

SEQ ID NO: 5367 - RNA, 16 nt, Artificial Sequence
  Antisense oligonucleotide
  misc_feature (1)..(1): BNA scaffold modification
  misc_feature (7)..(7): BNA scaffold modification
  misc_feature (15)..(16): BNA scaffold modification
guucuuguacuucatc

SEQ ID NO: 5368 - RNA, 16 nt, Artificial Sequence
  Antisense oligonucleotide
  misc_feature (1)..(1): BNA scaffold modification
  misc_feature (4)..(4): BNA scaffold modification
  misc_feature (10)..(10): BNA scaffold modification
  misc_feature (15)..(16): BNA scaffold modification
guucuuguacuucatc

SEQ ID NO: 5369 - RNA, 16 nt, Artificial Sequence
  Antisense oligonucleotide
  misc_feature (1)..(2): BNA scaffold modification
  misc_feature (15)..(16): BNA scaffold modification
gtucuuguacuucatc

SEQ ID NO: 5370 - RNA, 16 nt, Artificial Sequence
  Antisense oligonucleotide
  misc_feature (1)..(1): BNA scaffold modification
  misc_feature (16)..(16): BNA scaffold modification
tucuuguacuucaucc

SEQ ID NO: 5371 - RNA, 16 nt, Artificial Sequence
  Antisense oligonucleotide
  misc_feature (1)..(1): BNA scaffold modification
  misc_feature (3)..(3): BNA scaffold modification
  misc_feature (16)..(16): BNA scaffold modification
tucuuguacuucaucc

SEQ ID NO: 5372 - RNA, 16 nt, Artificial Sequence
  Antisense oligonucleotide
  misc_feature (1)..(1): BNA scaffold modification
  misc_feature (6)..(6): BNA scaffold modification
  misc_feature (16)..(16): BNA scaffold modification
tucuuguacuucaucc

SEQ ID NO: 5373 - RNA, 16 nt, Artificial Sequence
  Antisense oligonucleotide
  misc_feature (1)..(1): BNA scaffold modification
  misc_feature (9)..(9): BNA scaffold modification
  misc_feature (16)..(16): BNA scaffold modification
tucuuguacuucaucc

SEQ ID NO: 5374 - RNA, 16 nt, Artificial Sequence
  Antisense oligonucleotide
  misc_feature (1)..(1): BNA scaffold modification
  misc_feature (12)..(12): BNA scaffold modification
  misc_feature (16)..(16): BNA scaffold modification
tucuuguacuucaucc

SEQ ID NO: 5375 - RNA, 16 nt, Artificial Sequence
  Antisense oligonucleotide
  misc_feature (1)..(1): BNA scaffold modification
  misc_feature (3)..(3): BNA scaffold modification
  misc_feature (12)..(12): BNA scaffold modification
  misc_feature (16)..(16): BNA scaffold modification
tucuuguacuucaucc

SEQ ID NO: 5376 - RNA, 16 nt, Artificial Sequence
  Antisense oligonucleotide
  misc_feature (1)..(1): BNA scaffold modification
  misc_feature (6)..(6): BNA scaffold modification
  misc_feature (12)..(12): BNA scaffold modification
  misc_feature (16)..(16): BNA scaffold modification
tucuuguacuucaucc

SEQ ID NO: 5377 - RNA, 16 nt, Artificial Sequence
  Antisense oligonucleotide
  misc_feature (1)..(1): BNA scaffold modification
  misc_feature (3)..(3): BNA scaffold modification
  misc_feature (9)..(9): BNA scaffold modification
  misc_feature (16)..(16): BNA scaffold modification
tucuuguacuucaucc

SEQ ID NO: 5378 - RNA, 16 nt, Artificial Sequence
  Antisense oligonucleotide
  misc_feature (1)..(2): BNA scaffold modification
  misc_feature (15)..(16): BNA scaffold modification
ttcuuguacuucaucc

SEQ ID NO: 5379 - RNA, 16 nt, Artificial Sequence
  Antisense oligonucleotide
  misc_feature (1)..(2): BNA scaffold modification
  misc_feature (9)..(9): BNA scaffold modification
  misc_feature (15)..(16): BNA scaffold modification
ttcuuguacuucaucc

SEQ ID NO: 5380 - RNA, 16 nt, Artificial Sequence
  Antisense oligonucleotide
  misc_feature (1)..(2): BNA scaffold modification
  misc_feature (6)..(6): BNA scaffold modification
  misc_feature (12)..(12): BNA scaffold modification
  misc_feature (15)..(16): BNA scaffold modification
ttcuuguacuucaucc

SEQ ID NO: 5381 - RNA, 16 nt, Artificial Sequence
  Antisense oligonucleotide
  misc_feature (1)..(1): BNA scaffold modification
  misc_feature (16)..(16): BNA scaffold modification
tcuuguacuucauccc

SEQ ID NO: 5382 - RNA, 16 nt, Artificial Sequence
  Antisense oligonucleotide
  misc_feature (1)..(1): BNA scaffold modification
  misc_feature (5)..(5): BNA scaffold modification
  misc_feature (16)..(16): BNA scaffold modification
tcuuguacuucauccc

SEQ ID NO: 5383 - RNA, 16 nt, Artificial Sequence
  Antisense oligonucleotide
  misc_feature (1)..(1): BNA scaffold modification
  misc_feature (8)..(8): BNA scaffold modification
  misc_feature (16)..(16): BNA scaffold modification
tcuuguacuucauccc

SEQ ID NO: 5384 - RNA, 16 nt, Artificial Sequence
  Antisense oligonucleotide
  misc_feature (1)..(1): BNA scaffold modification
  misc_feature (11)..(11): BNA scaffold modification
  misc_feature (16)..(16): BNA scaffold modification
tcuuguacuucauccc

SEQ ID NO: 5385 - RNA, 16 nt, Artificial Sequence
  Antisense oligonucleotide
  misc_feature (1)..(1): BNA scaffold modification
  misc_feature (5)..(5): BNA scaffold modification
  misc_feature (11)..(11): BNA scaffold modification
  misc_feature (16)..(16): BNA scaffold modification
tcuuguacuucauccc

SEQ ID NO: 5386 - RNA, 16 nt, Artificial Sequence
  Antisense oligonucleotide
  misc_feature (1)..(2): BNA scaffold modification
  misc_feature (8)..(8): BNA scaffold modification
  misc_feature (16)..(16): BNA scaffold modification
tcuuguacuucauccc

SEQ ID NO: 5387 - RNA, 16 nt, Artificial Sequence
  Antisense oligonucleotide
  misc_feature (1)..(1): BNA scaffold modification
  misc_feature (5)..(5): BNA scaffold modification
  misc_feature (15)..(16): BNA scaffold modification
tcuuguacuucauccc

SEQ ID NO: 5388 - RNA, 16 nt, Artificial Sequence
  Antisense oligonucleotide
  misc_feature (1)..(2): BNA scaffold modification
  misc_feature (15)..(16): BNA scaffold modification
tcuuguacuucauccc

SEQ ID NO: 5389 - RNA, 16 nt, Artificial Sequence
  Antisense oligonucleotide
  misc_feature (1)..(2): BNA scaffold modification
  misc_feature (5)..(5): BNA scaffold modification
  misc_feature (11)..(11): BNA scaffold modification
  misc_feature (15)..(16): BNA scaffold modification
tcuuguacuucauccc

SEQ ID NO: 5390 - RNA, 16 nt, Artificial Sequence
  Antisense oligonucleotide
  misc_feature (1)..(1): BNA scaffold modification
  misc_feature (16)..(16): BNA scaffold modification
cuuguacuucauccca

SEQ ID NO: 5391 - RNA, 16 nt, Artificial Sequence
  Antisense oligonucleotide
  misc_feature (1)..(1): BNA scaffold modification
  misc_feature (4)..(4): BNA scaffold modification
  misc_feature (16)..(16): BNA scaffold modification
cuuguacuucauccca

SEQ ID NO: 5392 - RNA, 16 nt, Artificial Sequence
  Antisense oligonucleotide
  misc_feature (1)..(1): BNA scaffold modification
  misc_feature (7)..(7): BNA scaffold modification
  misc_feature (16)..(16): BNA scaffold modification
cuuguacuucauccca

SEQ ID NO: 5393 - RNA, 16 nt, Artificial Sequence
  Antisense oligonucleotide
  misc_feature (1)..(1): BNA scaffold modification
  misc_feature (10)..(10): BNA scaffold modification
  misc_feature (16)..(16): BNA scaffold modification
cuuguacuucauccca

SEQ ID NO: 5394 - RNA, 16 nt, Artificial Sequence
  Antisense oligonucleotide
  misc_feature (1)..(1): BNA scaffold modification
  misc_feature (4)..(4): BNA scaffold modification
  misc_feature (10)..(10): BNA scaffold modification
  misc_feature (16)..(16): BNA scaffold modification
cuuguacuucauccca

SEQ ID NO: 5395 - RNA, 16 nt, Artificial Sequence
  Antisense oligonucleotide
  misc_feature (1)..(1): BNA scaffold modification
  misc_feature (7)..(7): BNA scaffold modification
  misc_feature (10)..(10): BNA scaffold modification
  misc_feature (16)..(16): BNA scaffold modification
cuuguacuucauccca

SEQ ID NO: 5396 - RNA, 16 nt, Artificial Sequence
  Antisense oligonucleotide
  misc_feature (1)..(1): BNA scaffold modification
  misc_feature (4)..(4): BNA scaffold modification
  misc_feature (15)..(16): BNA scaffold modification
cuuguacuucauccca

SEQ ID NO: 5397 - RNA, 16 nt, Artificial Sequence
  Antisense oligonucleotide
  misc_feature (1)..(2): BNA scaffold modification
  misc_feature (15)..(16): BNA scaffold modification
ctuguacuucauccca

SEQ ID NO: 5398 - RNA, 16 nt, Artificial Sequence
  Antisense oligonucleotide
  misc_feature (1)..(2): BNA scaffold modification
  misc_feature (7)..(7): BNA scaffold modification
  misc_feature (10)..(10): BNA scaffold modification
  misc_feature (15)..(16): BNA scaffold modification
ctuguacuucauccca

SEQ ID NO: 5399 - RNA, 16 nt, Artificial Sequence
  Antisense oligonucleotide
  misc_feature (1)..(1): BNA scaffold modification
  misc_feature (16)..(16): BNA scaffold modification
tuguacuucaucccac

SEQ ID NO: 5400 - RNA, 16 nt, Artificial Sequence
  Antisense oligonucleotide
  misc_feature (1)..(1): BNA scaffold modification
  misc_feature (3)..(3): BNA scaffold modification
  misc_feature (16)..(16): BNA scaffold modification
tuguacuucaucccac

SEQ ID NO: 5401 - RNA, 16 nt, Artificial Sequence
  Antisense oligonucleotide
  misc_feature (1)..(1): BNA scaffold modification
  misc_feature (6)..(6): BNA scaffold modification
  misc_feature (16)..(16): BNA scaffold modification
tuguacuucaucccac

SEQ ID NO: 5402 - RNA, 16 nt, Artificial Sequence
  Antisense oligonucleotide
  misc_feature (1)..(1): BNA scaffold modification
  misc_feature (9)..(9): BNA scaffold modification
  misc_feature (16)..(16): BNA scaffold modification
tuguacuucaucccac

SEQ ID NO: 5403 - RNA, 16 nt, Artificial Sequence
  Antisense oligonucleotide
  misc_feature (1)..(1): BNA scaffold modification
  misc_feature (3)..(3): BNA scaffold modification
  misc_feature (9)..(9): BNA scaffold modification
  misc_feature (16)..(16): BNA scaffold modification
tuguacuucaucccac

SEQ ID NO: 5404 - RNA, 16 nt, Artificial Sequence
  Antisense oligonucleotide
  misc_feature (1)..(1): BNA scaffold modification
  misc_feature (3)..(3): BNA scaffold modification
  misc_feature (6)..(6): BNA scaffold modification
  misc_feature (16)..(16): BNA scaffold modification
tuguacuucaucccac

SEQ ID NO: 5405 - RNA, 16 nt, Artificial Sequence
  Antisense oligonucleotide
  misc_feature (1)..(1): BNA scaffold modification
  misc_feature (6)..(6): BNA scaffold modification
  misc_feature (9)..(9): BNA scaffold modification
  misc_feature (16)..(16): BNA scaffold modification
tuguacuucaucccac

SEQ ID NO: 5406 - RNA, 16 nt, Artificial Sequence
  Antisense oligonucleotide
  misc_feature (1)..(1): BNA scaffold modification
  misc_feature (15)..(16): BNA scaffold modification
tuguacuucaucccac

SEQ ID NO: 5407 - RNA, 16 nt, Artificial Sequence
  Antisense oligonucleotide
  misc_feature (1)..(2): BNA scaffold modification
  misc_feature (9)..(9): BNA scaffold modification
  misc_feature (15)..(16): BNA scaffold modification
ttguacuucaucccac

SEQ ID NO: 5408 - RNA, 16 nt, Artificial Sequence
  Antisense oligonucleotide
  misc_feature (1)..(1): BNA scaffold modification
  misc_feature (16)..(16): BNA scaffold modification
tguacuucaucccact

SEQ ID NO: 5409 - RNA, 16 nt, Artificial Sequence
  Antisense oligonucleotide
  misc_feature (1)..(1): BNA scaffold modification
  misc_feature (5)..(5): BNA scaffold modification
  misc_feature (16)..(16): BNA scaffold modification
tguacuucaucccact

SEQ ID NO: 5410 - RNA, 16 nt, Artificial Sequence
  Antisense oligonucleotide
  misc_feature (1)..(1): BNA scaffold modification
  misc_feature (8)..(8): BNA scaffold modification
  misc_feature (16)..(16): BNA scaffold modification
tguacuucaucccact

SEQ ID NO: 5411 - RNA, 16 nt, Artificial Sequence
  Antisense oligonucleotide
  misc_feature (1)..(1): BNA scaffold modification
  misc_feature (15)..(16): BNA scaffold modification
tguacuucaucccact

SEQ ID NO: 5412 - RNA, 16 nt, Artificial Sequence
  Antisense oligonucleotide
  misc_feature (1)..(1): BNA scaffold modification
  misc_feature (8)..(8): BNA scaffold modification
  misc_feature (15)..(16): BNA scaffold modification
tguacuucaucccact

SEQ ID NO: 5413 - RNA, 16 nt, Artificial Sequence
  Antisense oligonucleotide
  misc_feature (1)..(1): BNA scaffold modification
  misc_feature (5)..(5): BNA scaffold modification
  misc_feature (8)..(8): BNA scaffold modification
  misc_feature (16)..(16): BNA scaffold modification
tguacuucaucccact

SEQ ID NO: 5414 - RNA, 16 nt, Artificial Sequence
  Antisense oligonucleotide
  misc_feature (1)..(2): BNA scaffold modification
  misc_feature (8)..(8): BNA scaffold modification
  misc_feature (16)..(16): BNA scaffold modification
tguacuucaucccact

SEQ ID NO: 5415 - RNA, 16 nt, Artificial Sequence
  Antisense oligonucleotide
  misc_feature (1)..(2): BNA scaffold modification
  misc_feature (15)..(16): BNA scaffold modification
tguacuucaucccact

SEQ ID NO: 5416 - RNA, 16 nt, Artificial Sequence
  Antisense oligonucleotide
  misc_feature (1)..(2): BNA scaffold modification
  misc_feature (5)..(5): BNA scaffold modification
  misc_feature (8)..(8): BNA scaffold modification
  misc_feature (15)..(16): BNA scaffold modification
tguacuucaucccact

SEQ ID NO: 5417 - RNA, 16 nt, Artificial Sequence
  Antisense oligonucleotide
  misc_feature (1)..(1): BNA scaffold modification
  misc_feature (16)..(16): BNA scaffold modification
guacuucaucccacug

SEQ ID NO: 5418 - RNA, 16 nt, Artificial Sequence
  Antisense oligonucleotide
  misc_feature (1)..(1): BNA scaffold modification
  misc_feature (4)..(4): BNA scaffold modification
  misc_feature (16)..(16): BNA scaffold modification
guacuucaucccacug

SEQ ID NO: 5419 - RNA, 16 nt, Artificial Sequence
  Antisense oligonucleotide
  misc_feature (1)..(1): BNA scaffold modification
  misc_feature (7)..(7): BNA scaffold modification
  misc_feature (16)..(16): BNA scaffold modification
guacuucaucccacug

SEQ ID NO: 5420 - RNA, 16 nt, Artificial Sequence
  Antisense oligonucleotide
  misc_feature (1)..(1): BNA scaffold modification
  misc_feature (14)..(14): BNA scaffold modification
  misc_feature (16)..(16): BNA scaffold modification
guacuucaucccacug

SEQ ID NO: 5421 - RNA, 16 nt, Artificial Sequence
  Antisense oligonucleotide
  misc_feature (1)..(1): BNA scaffold modification
  misc_feature (4)..(4): BNA scaffold modification
  misc_feature (14)..(14): BNA scaffold modification
  misc_feature (16)..(16): BNA scaffold modification
guacuucaucccacug

SEQ ID NO: 5422 - RNA, 16 nt, Artificial Sequence
  Antisense oligonucleotide
  misc_feature (1)..(1): BNA scaffold modification
  misc_feature (7)..(7): BNA scaffold modification
  misc_feature (14)..(14): BNA scaffold modification
  misc_feature (16)..(16): BNA scaffold modification
guacuucaucccacug

SEQ ID NO: 5423 - RNA, 16 nt, Artificial Sequence
  Antisense oligonucleotide
  misc_feature (1)..(1): BNA scaffold modification
  misc_feature (15)..(16): BNA scaffold modification
guacuucaucccactg

SEQ ID NO: 5424 - RNA, 16 nt, Artificial Sequence
  Antisense oligonucleotide
  misc_feature (1)..(1): BNA scaffold modification
  misc_feature (7)..(7): BNA scaffold modification
  misc_feature (15)..(16): BNA scaffold modification
guacuucaucccactg

SEQ ID NO: 5425 - RNA, 16 nt, Artificial Sequence
  Antisense oligonucleotide
  misc_feature (1)..(2): BNA scaffold modification
  misc_feature (4)..(4): BNA scaffold modification
  misc_feature (15)..(16): BNA scaffold modification
gtacuucaucccactg

SEQ ID NO: 5426 - RNA, 16 nt, Artificial Sequence
  Antisense oligonucleotide
  misc_feature (1)..(1): BNA scaffold modification
  misc_feature (16)..(16): BNA scaffold modification
tacuucaucccacuga

SEQ ID NO: 5427 - RNA, 16 nt, Artificial Sequence
  Antisense oligonucleotide
  misc_feature (1)..(1): BNA scaffold modification
  misc_feature (3)..(3): BNA scaffold modification
  misc_feature (16)..(16): BNA scaffold modification
tacuucaucccacuga

SEQ ID NO: 5428 - RNA, 16 nt, Artificial Sequence
  Antisense oligonucleotide
  misc_feature (1)..(1): BNA scaffold modification
  misc_feature (6)..(6): BNA scaffold modification
  misc_feature (16)..(16): BNA scaffold modification
tacuucaucccacuga

SEQ ID NO: 5429 - RNA, 16 nt, Artificial Sequence
  Antisense oligonucleotide
  misc_feature (1)..(1): BNA scaffold modification
  misc_feature (13)..(13): BNA scaffold modification
  misc_feature (16)..(16): BNA scaffold modification
tacuucaucccacuga

SEQ ID NO: 5430 - RNA, 16 nt, Artificial Sequence
  Antisense oligonucleotide
  misc_feature (1)..(1): BNA scaffold modification
  misc_feature (15)..(16): BNA scaffold modification
tacuucaucccacuga

SEQ ID NO: 5431 - RNA, 16 nt, Artificial Sequence
  Antisense oligonucleotide
  misc_feature (1)..(1): BNA scaffold modification
  misc_feature (6)..(6): BNA scaffold modification
  misc_feature (15)..(16): BNA scaffold modification
tacuucaucccacuga

SEQ ID NO: 5432 - RNA, 16 nt, Artificial Sequence
  Antisense oligonucleotide
  misc_feature (1)..(1): BNA scaffold modification
  misc_feature (3)..(3): BNA scaffold modification
  misc_feature (15)..(16): BNA scaffold modification
tacuucaucccacuga

SEQ ID NO: 5433 - RNA, 16 nt, Artificial Sequence
  Antisense oligonucleotide
  misc_feature (1)..(2): BNA scaffold modification
  misc_feature (15)..(16): BNA scaffold modification
tacuucaucccacuga

SEQ ID NO: 5434 - RNA, 16 nt, Artificial Sequence
  Antisense oligonucleotide
  misc_feature (1)..(2): BNA scaffold modification
  misc_feature (6)..(6): BNA scaffold modification
  misc_feature (16)..(16): BNA scaffold modification
tacuucaucccacuga

SEQ ID NO: 5435 - RNA, 16 nt, Artificial Sequence
  Antisense oligonucleotide
  misc_feature (1)..(1): BNA scaffold modification
  misc_feature (16)..(16): BNA scaffold modification
acuucaucccacugat

SEQ ID NO: 5436 - RNA, 16 nt, Artificial Sequence
  Antisense oligonucleotide
  misc_feature (1)..(2): BNA scaffold modification
  misc_feature (16)..(16): BNA scaffold modification
acuucaucccacugat

SEQ ID NO: 5437 - RNA, 16 nt, Artificial Sequence
  Antisense oligonucleotide
  misc_feature (1)..(1): BNA scaffold modification
  misc_feature (5)..(5): BNA scaffold modification
  misc_feature (16)..(16): BNA scaffold modification
acuucaucccacugat

SEQ ID NO: 5438 - RNA, 16 nt, Artificial Sequence
  Antisense oligonucleotide
  misc_feature (1)..(1): BNA scaffold modification
  misc_feature (16)..(16): BNA scaffold modification
acuucaucccacugat

SEQ ID NO: 5439 - RNA, 16 nt, Artificial Sequence
  Antisense oligonucleotide
  misc_feature (1)..(1): BNA scaffold modification
  misc_feature (12)..(12): BNA scaffold modification
  misc_feature (16)..(16): BNA scaffold modification
acuucaucccacugat

SEQ ID NO: 5440 - RNA, 16 nt, Artificial Sequence
  Antisense oligonucleotide
  misc_feature (1)..(1): BNA scaffold modification
  misc_feature (14)..(14): BNA scaffold modification
  misc_feature (16)..(16): BNA scaffold modification
acuucaucccacugat

SEQ ID NO: 5441 - RNA, 16 nt, Artificial Sequence
  Antisense oligonucleotide
  misc_feature (1)..(1): BNA scaffold modification
  misc_feature (5)..(5): BNA scaffold modification
  misc_feature (14)..(14): BNA scaffold modification
  misc_feature (16)..(16): BNA scaffold modification
acuucaucccacugat

SEQ ID NO: 5442 - RNA, 16 nt, Artificial Sequence
  Antisense oligonucleotide
  misc_feature (1)..(1): BNA scaffold modification
  misc_feature (5)..(5): BNA scaffold modification
  misc_feature (12)..(12): BNA scaffold modification
  misc_feature (16)..(16): BNA scaffold modification
acuucaucccacugat

SEQ ID NO: 5443 - RNA, 16 nt, Artificial Sequence
  Antisense oligonucleotide
  misc_feature (1)..(2): BNA scaffold modification
  misc_feature (15)..(16): BNA scaffold modification
acuucaucccacugat

SEQ ID NO: 5444 - RNA, 16 nt, Artificial Sequence
  Antisense oligonucleotide
  misc_feature (1)..(2): BNA scaffold modification
  misc_feature (5)..(5): BNA scaffold modification
  misc_feature (15)..(16): BNA scaffold modification
acuucaucccacugat

SEQ ID NO: 5445 - RNA, 16 nt, Artificial Sequence
  Antisense oligonucleotide
  misc_feature (1)..(2): BNA scaffold modification
  misc_feature (5)..(5): BNA scaffold modification
  misc_feature (12)..(12): BNA scaffold modification
  misc_feature (15)..(16): BNA scaffold modification
acuucaucccacugat

SEQ ID NO: 5446 - RNA, 24 nt, Artificial Sequence
  Antisense oligonucleotide
  misc_feature (1)..(1): BNA scaffold modification
  misc_feature (24)..(24): BNA scaffold modification
gacccuccuuccaugacucaagct

SEQ ID NO: 5447 - RNA, 24 nt, Artificial Sequence
  Antisense oligonucleotide
  misc_feature (1)..(1): BNA scaffold modification
  misc_feature (5)..(5): BNA scaffold modification
  misc_feature (24)..(24): BNA scaffold modification
gacccuccuuccaugacucaagct

SEQ ID NO: 5448 - RNA, 24 nt, Artificial Sequence
  Antisense oligonucleotide
  misc_feature (1)..(1): BNA scaffold modification
  misc_feature (8)..(8): BNA scaffold modification
  misc_feature (24)..(24): BNA scaffold modification
gacccuccuuccaugacucaagct

SEQ ID NO: 5449 - RNA, 24 nt, Artificial Sequence
  Antisense oligonucleotide
  misc_feature (1)..(1): BNA scaffold modification
  misc_feature (12)..(12): BNA scaffold modification
  misc_feature (24)..(24): BNA scaffold modification
gacccuccuuccaugacucaagct

SEQ ID NO: 5450 - RNA, 24 nt, Artificial Sequence
  Antisense oligonucleotide
  misc_feature (1)..(1): BNA scaffold modification
  misc_feature (15)..(15): BNA scaffold modification
  misc_feature (24)..(24): BNA scaffold modification
gacccuccuuccaugacucaagct

SEQ ID NO: 5451 - RNA, 24 nt, Artificial Sequence
  Antisense oligonucleotide
  misc_feature (1)..(1): BNA scaffold modification
  misc_feature (17)..(17): BNA scaffold modification
  misc_feature (24)..(24): BNA scaffold modification
gacccuccuuccaugacucaagct

SEQ ID NO: 5452 - RNA, 24 nt, Artificial Sequence
  Antisense oligonucleotide
  misc_feature (1)..(1): BNA scaffold modification
  misc_feature (19)..(19): BNA scaffold modification
  misc_feature (24)..(24): BNA scaffold modification
gacccuccuuccaugacucaagct

SEQ ID NO: 5453 - RNA, 24 nt, Artificial Sequence
  Antisense oligonucleotide
  misc_feature (1)..(1): BNA scaffold modification
  misc_feature (22)..(22): BNA scaffold modification
  misc_feature (24)..(24): BNA scaffold modification
gacccuccuuccaugacucaagct

SEQ ID NO: 5454 - RNA, 24 nt, Artificial Sequence
  Antisense oligonucleotide
  misc_feature (1)..(1): BNA scaffold modification
  misc_feature (15)..(15): BNA scaffold modification
  misc_feature (22)..(22): BNA scaffold modification
  misc_feature (24)..(24): BNA scaffold modification
gacccuccuuccaugacucaagct

SEQ ID NO: 5455 - RNA, 24 nt, Artificial Sequence
  Antisense oligonucleotide
  misc_feature (1)..(1): BNA scaffold modification
  misc_feature (12)..(12): BNA scaffold modification
  misc_feature (19)..(19): BNA scaffold modification
  misc_feature (24)..(24): BNA scaffold modification
gacccuccuuccaugacucaagct

SEQ ID NO: 5456 - RNA, 24 nt, Artificial Sequence
  Antisense oligonucleotide
  misc_feature (1)..(1): BNA scaffold modification
  misc_feature (7)..(7): BNA scaffold modification
  misc_feature (11)..(11): BNA scaffold modification
  misc_feature (24)..(24): BNA scaffold modification
gacccuccuuccaugacucaagct

SEQ ID NO: 5457 - RNA, 24 nt, Artificial Sequence
  Antisense oligonucleotide
  misc_feature (1)..(1): BNA scaffold modification
  misc_feature (23)..(24): BNA scaffold modification
gacccuccuuccaugacucaagct

SEQ ID NO: 5458 - RNA, 24 nt, Artificial Sequence
  Antisense oligonucleotide
  misc_feature (1)..(1): BNA scaffold modification
  misc_feature (15)..(15): BNA scaffold modification
  misc_feature (23)..(24): BNA scaffold modification
gacccuccuuccaugacucaagct

SEQ ID NO: 5459 - RNA, 24 nt, Artificial Sequence
  Antisense oligonucleotide
  misc_feature (1)..(1): BNA scaffold modification
  misc_feature (15)..(15): BNA scaffold modification
  misc_feature (22)..(24): BNA scaffold modification
gacccuccuuccaugacucaagct

SEQ ID NO: 5460 - RNA, 24 nt, Artificial Sequence
  Antisense oligonucleotide
  misc_feature (1)..(2): BNA scaffold modification
  misc_feature (17)..(17): BNA scaffold modification
  misc_feature (23)..(24): BNA scaffold modification
gacccuccuuccaugacucaagct

SEQ ID NO: 5461 - RNA, 22 nt, Artificial Sequence
  Antisense oligonucleotide
  misc_feature (1)..(1): BNA scaffold modification
  misc_feature (22)..(22): BNA scaffold modification
gacccuccuuccaugacucaag

SEQ ID NO: 5462 - RNA, 22 nt, Artificial Sequence
  Antisense oligonucleotide
  misc_feature (1)..(1): BNA scaffold modification
  misc_feature (7)..(7): BNA scaffold modification
  misc_feature (22)..(22): BNA scaffold modification
gacccuccuuccaugacucaag

SEQ ID NO: 5463 - RNA, 22 nt, Artificial Sequence
  Antisense oligonucleotide
  misc_feature (1)..(1): BNA scaffold modification
  misc_feature (11)..(11): BNA scaffold modification
  misc_feature (22)..(22): BNA scaffold modification
gacccuccuuccaugacucaag

SEQ ID NO: 5464 - RNA, 22 nt, Artificial Sequence
  Antisense oligonucleotide
  misc_feature (1)..(1): BNA scaffold modification
  misc_feature (15)..(15): BNA scaffold modification
  misc_feature (22)..(22): BNA scaffold modification
gacccuccuuccaugacucaag

SEQ ID NO: 5465 - RNA, 22 nt, Artificial Sequence
  Antisense oligonucleotide
  misc_feature (1)..(1): BNA scaffold modification
  misc_feature (17)..(17): BNA scaffold modification
  misc_feature (22)..(22): BNA scaffold modification
gacccuccuuccaugacucaag

SEQ ID NO: 5466 - RNA, 22 nt, Artificial Sequence
  Antisense oligonucleotide
  misc_feature (1)..(1): BNA scaffold modification
  misc_feature (19)..(19): BNA scaffold modification
  misc_feature (22)..(22): BNA scaffold modification
gacccuccuuccaugacucaag

SEQ ID NO: 5467 - RNA, 22 nt, Artificial Sequence
  Antisense oligonucleotide
  misc_feature (1)..(1): BNA scaffold modification
  misc_feature (12)..(12): BNA scaffold modification
  misc_feature (19)..(19): BNA scaffold modification
  misc_feature (22)..(22): BNA scaffold modification
gacccuccuuccaugacucaag

SEQ ID NO: 5468 - RNA, 22 nt, Artificial Sequence
  Antisense oligonucleotide
  misc_feature (1)..(1): BNA scaffold modification
  misc_feature (8)..(8): BNA scaffold modification
  misc_feature (17)..(17): BNA scaffold modification
  misc_feature (22)..(22): BNA scaffold modification
gacccuccuuccaugacucaag

SEQ ID NO: 5469 - RNA, 22 nt, Artificial Sequence
  Antisense oligonucleotide
  misc_feature (1)..(1): BNA scaffold modification
  misc_feature (15)..(15): BNA scaffold modification
  misc_feature (19)..(19): BNA scaffold modification
  misc_feature (22)..(22): BNA scaffold modification
gacccuccuuccaugacucaag

SEQ ID NO: 5470 - RNA, 22 nt, Artificial Sequence
  Antisense oligonucleotide
  misc_feature (1)..(1): BNA scaffold modification
  misc_feature (5)..(5): BNA scaffold modification
  misc_feature (12)..(12): BNA scaffold modification
  misc_feature (22)..(22): BNA scaffold modification
gacccuccuuccaugacucaag

SEQ ID NO: 5471 - RNA, 22 nt, Artificial Sequence
  Antisense oligonucleotide
  misc_feature (1)..(1): BNA scaffold modification
  misc_feature (21)..(22): BNA scaffold modification
gacccuccuuccaugacucaag

SEQ ID NO: 5472 - RNA, 22 nt, Artificial Sequence
  Antisense oligonucleotide
  misc_feature (1)..(2): BNA scaffold modification
  misc_feature (21)..(22): BNA scaffold modification
gacccuccuuccaugacucaag

SEQ ID NO: 5473 - RNA, 22 nt, Artificial Sequence
  Antisense oligonucleotide
  misc_feature (1)..(1): BNA scaffold modification
  misc_feature (15)..(15): BNA scaffold modification
  misc_feature (21)..(22): BNA scaffold modification
gacccuccuuccaugacucaag

SEQ ID NO: 5474 - RNA, 22 nt, Artificial Sequence
  Antisense oligonucleotide
  misc_feature (1)..(1): BNA scaffold modification
  misc_feature (8)..(8): BNA scaffold modification
  misc_feature (15)..(15): BNA scaffold modification
  misc_feature (19)..(19): BNA scaffold modification
  misc_feature (21)..(22): BNA scaffold modification
gacccuccuuccaugacucaag

SEQ ID NO: 5475 - RNA, 22 nt, Artificial Sequence
  Antisense oligonucleotide
  misc_feature (1)..(1): BNA scaffold modification
  misc_feature (22)..(22): BNA scaffold modification
acccuccuuccaugacucaagc

SEQ ID NO: 5476 - RNA, 22 nt, Artificial Sequence
  Antisense oligonucleotide
  misc_feature (1)..(1): BNA scaffold modification
  misc_feature (21)..(22): BNA scaffold modification
acccuccuuccaugacucaagc

SEQ ID NO: 5477 - RNA, 22 nt, Artificial Sequence
  Antisense oligonucleotide
  misc_feature (1)..(1): BNA scaffold modification
  misc_feature (18)..(18): BNA scaffold modification
  misc_feature (22)..(22): BNA scaffold modification
acccuccuuccaugacucaagc

SEQ ID NO: 5478 - RNA, 22 nt, Artificial Sequence
  Antisense oligonucleotide
  misc_feature (1)..(1): BNA scaffold modification
  misc_feature (16)..(16): BNA scaffold modification
  misc_feature (22)..(22): BNA scaffold modification
acccuccuuccaugacucaagc

SEQ ID NO: 5479 - RNA, 22 nt, Artificial Sequence
  Antisense oligonucleotide
  misc_feature (1)..(1): BNA scaffold modification
  misc_feature (14)..(14): BNA scaffold modification
  misc_feature (22)..(22): BNA scaffold modification
acccuccuuccaugacucaagc

SEQ ID NO: 5480 - RNA, 22 nt, Artificial Sequence
  Antisense oligonucleotide
  misc_feature (1)..(1): BNA scaffold modification
  misc_feature (11)..(11): BNA scaffold modification
  misc_feature (22)..(22): BNA scaffold modification
acccuccuuccaugacucaagc

SEQ ID NO: 5481 - RNA, 22 nt, Artificial Sequence
  Antisense oligonucleotide
  misc_feature (1)..(1): BNA scaffold modification
  misc_feature (7)..(7): BNA scaffold modification
  misc_feature (22)..(22): BNA scaffold modification
acccuccuuccaugacucaagc

SEQ ID NO: 5482 - RNA, 22 nt, Artificial Sequence
  Antisense oligonucleotide
  misc_feature (1)..(1): BNA scaffold modification
  misc_feature (14)..(14): BNA scaffold modification
  misc_feature (21)..(22): BNA scaffold modification
acccuccuuccaugacucaagc

SEQ ID NO: 5483 - RNA, 22 nt, Artificial Sequence
  Antisense oligonucleotide
  misc_feature (1)..(1): BNA scaffold modification
  misc_feature (11)..(11): BNA scaffold modification
  misc_feature (18)..(18): BNA scaffold modification
  misc_feature (22)..(22): BNA scaffold modification
acccuccuuccaugacucaagc

SEQ ID NO: 5484 - RNA, 22 nt, Artificial Sequence
  Antisense oligonucleotide
  misc_feature (1)..(1): BNA scaffold modification
  misc_feature (7)..(7): BNA scaffold modification
  misc_feature (16)..(16): BNA scaffold modification
  misc_feature (22)..(22): BNA scaffold modification
acccuccuuccaugacucaagc

SEQ ID NO: 5485 - RNA, 22 nt, Artificial Sequence
  Antisense oligonucleotide
  misc_feature (1)..(1): BNA scaffold modification
  misc_feature (4)..(4): BNA scaffold modification
  misc_feature (11)..(11): BNA scaffold modification
  misc_feature (22)..(22): BNA scaffold modification
acccuccuuccaugacucaagc

SEQ ID NO: 5486 - RNA, 22 nt, Artificial Sequence
  Antisense oligonucleotide
  misc_feature (1)..(1): BNA scaffold modification
  misc_feature (21)..(22): BNA scaffold modification
acccuccuuccaugacucaagc

SEQ ID NO: 5487 - RNA, 22 nt, Artificial Sequence
  Antisense oligonucleotide
  misc_feature (1)..(2): BNA scaffold modification
  misc_feature (21)..(22): BNA scaffold modification
acccuccuuccaugacucaagc

SEQ ID NO: 5488 - RNA, 22 nt, Artificial Sequence
  Antisense oligonucleotide
  misc_feature (1)..(2): BNA scaffold modification
  misc_feature (14)..(14): BNA scaffold modification
  misc_feature (21)..(22): BNA scaffold modification
acccuccuuccaugacucaagc

SEQ ID NO: 5489 - RNA, 22 nt, Artificial Sequence
  Antisense oligonucleotide
  misc_feature (1)..(1): BNA scaffold modification
  misc_feature (22)..(22): BNA scaffold modification
cccuccuuccaugacucaagct

SEQ ID NO: 5490 - RNA, 22 nt, Artificial Sequence
  Antisense oligonucleotide
  misc_feature (1)..(1): BNA scaffold modification
  misc_feature (20)..(20): BNA scaffold modification
  misc_feature (22)..(22): BNA scaffold modification
cccuccuuccaugacucaagct

SEQ ID NO: 5491 - RNA, 22 nt, Artificial Sequence
  Antisense oligonucleotide
  misc_feature (1)..(1): BNA scaffold modification
  misc_feature (17)..(17): BNA scaffold modification
  misc_feature (22)..(22): BNA scaffold modification
cccuccuuccaugacucaagct

SEQ ID NO: 5492 - RNA, 22 nt, Artificial Sequence
  Antisense oligonucleotide
  misc_feature (1)..(1): BNA scaffold modification
  misc_feature (15)..(15): BNA scaffold modification
  misc_feature (22)..(22): BNA scaffold modification
cccuccuuccaugacucaagct

SEQ ID NO: 5493 - RNA, 22 nt, Artificial Sequence
  Antisense oligonucleotide
  misc_feature (1)..(1): BNA scaffold modification
  misc_feature (13)..(13): BNA scaffold modification
  misc_feature (22)..(22): BNA scaffold modification
cccuccuuccaugacucaagct

SEQ ID NO: 5494 - RNA, 22 nt, Artificial Sequence
  Antisense oligonucleotide
  misc_feature (1)..(1): BNA scaffold modification
  misc_feature (10)..(10): BNA scaffold modification
  misc_feature (22)..(22): BNA scaffold modification
cccuccuuccaugacucaagct

SEQ ID NO: 5495 - RNA, 22 nt, Artificial Sequence
  Antisense oligonucleotide
  misc_feature (1)..(1): BNA scaffold modification
  misc_feature (6)..(6): BNA scaffold modification
  misc_feature (22)..(22): BNA scaffold modification
cccuccuuccaugacucaagct

SEQ ID NO: 5496 - RNA, 22 nt, Artificial Sequence
  Antisense oligonucleotide
  misc_feature (1)..(1): BNA scaffold modification
  misc_feature (3)..(3): BNA scaffold modification
  misc_feature (22)..(22): BNA scaffold modification
cccuccuuccaugacucaagct

SEQ ID NO: 5497 - RNA, 22 nt, Artificial Sequence
  Antisense oligonucleotide
  misc_feature (1)..(1): BNA scaffold modification
  misc_feature (13)..(13): BNA scaffold modification
  misc_feature (20)..(20): BNA scaffold modification
  misc_feature (22)..(22): BNA scaffold modification
cccuccuuccaugacucaagct

SEQ ID NO: 5498 - RNA, 22 nt, Artificial Sequence
  Antisense oligonucleotide
  misc_feature (1)..(1): BNA scaffold modification
  misc_feature (10)..(10): BNA scaffold modification
  misc_feature (17)..(17): BNA scaffold modification
  misc_feature (22)..(22): BNA scaffold modification
cccuccuuccaugacucaagct

SEQ ID NO: 5499 - RNA, 22 nt, Artificial Sequence
  Antisense oligonucleotide
  misc_feature (1)..(1): BNA scaffold modification
  misc_feature (6)..(6): BNA scaffold modification
  misc_feature (15)..(15): BNA scaffold modification
  misc_feature (22)..(22): BNA scaffold modification
cccuccuuccaugacucaagct

SEQ ID NO: 5500 - RNA, 22 nt, Artificial Sequence
  Antisense oligonucleotide
  misc_feature (1)..(1): BNA scaffold modification
  misc_feature (21)..(22): BNA scaffold modification
cccuccuuccaugacucaagct

SEQ ID NO: 5501 - RNA, 22 nt, Artificial Sequence
  Antisense oligonucleotide
  misc_feature (1)..(2): BNA scaffold modification
  misc_feature (21)..(22): BNA scaffold modification
cccuccuuccaugacucaagct

SEQ ID NO: 5502 - RNA, 22 nt, Artificial Sequence
  Antisense oligonucleotide
  misc_feature (1)..(1): BNA scaffold modification
  misc_feature (13)..(13): BNA scaffold modification
  misc_feature (17)..(17): BNA scaffold modification
  misc_feature (21)..(22): BNA scaffold modification
cccuccuuccaugacucaagct

SEQ ID NO: 5503 - RNA, 20 nt, Artificial Sequence
  Antisense oligonucleotide
  misc_feature (1)..(1): BNA scaffold modification
  misc_feature (20)..(20): BNA scaffold modification
gacccuccuuccaugacuca

SEQ ID NO: 5504 - RNA, 20 nt, Artificial Sequence
  Antisense oligonucleotide
  misc_feature (1)..(1): BNA scaffold modification
  misc_feature (17)..(17): BNA scaffold modification
  misc_feature (20)..(20): BNA scaffold modification
gacccuccuuccaugacuca

SEQ ID NO: 5505 - RNA, 20 nt, Artificial Sequence
  Antisense oligonucleotide
  misc_feature (1)..(1): BNA scaffold modification
  misc_feature (15)..(15): BNA scaffold modification
  misc_feature (20)..(20): BNA scaffold modification
gacccuccuuccaugacuca

SEQ ID NO: 5506 - RNA, 20 nt, Artificial Sequence
  Antisense oligonucleotide
  misc_feature (1)..(1): BNA scaffold modification
  misc_feature (12)..(12): BNA scaffold modification
  misc_feature (20)..(20): BNA scaffold modification
gacccuccuuccaugacuca

SEQ ID NO: 5507 - RNA, 20 nt, Artificial Sequence
  Antisense oligonucleotide
  misc_feature (1)..(1): BNA scaffold modification
  misc_feature (8)..(8): BNA scaffold modification
  misc_feature (20)..(20): BNA scaffold modification
gacccuccuuccaugacuca

SEQ ID NO: 5508 - RNA, 20 nt, Artificial Sequence
  Antisense oligonucleotide
  misc_feature (1)..(1): BNA scaffold modification
  misc_feature (5)..(5): BNA scaffold modification
  misc_feature (20)..(20): BNA scaffold modification
gacccuccuuccaugacuca

SEQ ID NO: 5509 - RNA, 20 nt, Artificial Sequence
  Antisense oligonucleotide
  misc_feature (1)..(1): BNA scaffold modification
  misc_feature (8)..(8): BNA scaffold modification
  misc_feature (15)..(15): BNA scaffold modification
  misc_feature (20)..(20): BNA scaffold modification
gacccuccuuccaugacuca

SEQ ID NO: 5510 - RNA, 20 nt, Artificial Sequence
  Antisense oligonucleotide
  misc_feature (1)..(1): BNA scaffold modification
  misc_feature (12)..(12): BNA scaffold modification
  misc_feature (17)..(17): BNA scaffold modification
  misc_feature (20)..(20): BNA scaffold modification
gacccuccuuccaugacuca

SEQ ID NO: 5511 - RNA, 20 nt, Artificial Sequence
  Antisense oligonucleotide
  misc_feature (1)..(1): BNA scaffold modification
  misc_feature (5)..(5): BNA scaffold modification
  misc_feature (12)..(12): BNA scaffold modification
  misc_feature (20)..(20): BNA scaffold modification
gacccuccuuccaugacuca

SEQ ID NO: 5512 - RNA, 20 nt, Artificial Sequence
  Antisense oligonucleotide
  misc_feature (1)..(1): BNA scaffold modification
  misc_feature (19)..(20): BNA scaffold modification
gacccuccuuccaugacuca

SEQ ID NO: 5513 - RNA, 20 nt, Artificial Sequence
  Antisense oligonucleotide
  misc_feature (1)..(2): BNA scaffold modification
  misc_feature (19)..(20): BNA scaffold modification
gacccuccuuccaugacuca

SEQ ID NO: 5514 - RNA, 20 nt, Artificial Sequence
  Antisense oligonucleotide
  misc_feature (1)..(2): BNA scaffold modification
  misc_feature (15)..(15): BNA scaffold modification
  misc_feature (19)..(20): BNA scaffold modification
gacccuccuuccaugacuca

SEQ ID NO: 5515 - RNA, 20 nt, Artificial Sequence
  Antisense oligonucleotide
  misc_feature (1)..(1): BNA scaffold modification
  misc_feature (12)..(12): BNA scaffold modification
  misc_feature (17)..(17): BNA scaffold modification
  misc_feature (19)..(20): BNA scaffold modification
gacccuccuuccaugacuca

SEQ ID NO: 5516 - RNA, 20 nt, Artificial Sequence
  Antisense oligonucleotide
  misc_feature (1)..(1): BNA scaffold modification
  misc_feature (8)..(8): BNA scaffold modification
  misc_feature (15)..(15): BNA scaffold modification
  misc_feature (19)..(20): BNA scaffold modification
gacccuccuuccaugacuca

SEQ ID NO: 5517 - RNA, 20 nt, Artificial Sequence
  Antisense oligonucleotide
  misc_feature (1)..(1): BNA scaffold modification
  misc_feature (20)..(20): BNA scaffold modification
acccuccuuccaugacucaa

SEQ ID NO: 5518 - RNA, 20 nt, Artificial Sequence
  Antisense oligonucleotide
  misc_feature (1)..(1): BNA scaffold modification
  misc_feature (18)..(18): BNA scaffold modification
  misc_feature (20)..(20): BNA scaffold modification
acccuccuuccaugacucaa

SEQ ID NO: 5519 - RNA, 20 nt, Artificial Sequence
  Antisense oligonucleotide
  misc_feature (1)..(1): BNA scaffold modification
  misc_feature (16)..(16): BNA scaffold modification
  misc_feature (20)..(20): BNA scaffold modification
acccuccuuccaugacucaa

SEQ ID NO: 5520 - RNA, 20 nt, Artificial Sequence
  Antisense oligonucleotide
  misc_feature (1)..(1): BNA scaffold modification
  misc_feature (14)..(14): BNA scaffold modification
  misc_feature (20)..(20): BNA scaffold modification
acccuccuuccaugacucaa

SEQ ID NO: 5521 - RNA, 20 nt, Artificial Sequence
  Antisense oligonucleotide
  misc_feature (1)..(1): BNA scaffold modification
  misc_feature (11)..(11): BNA scaffold modification
  misc_feature (20)..(20): BNA scaffold modification
acccuccuuccaugacucaa

SEQ ID NO: 5522 - RNA, 20 nt, Artificial Sequence
  Antisense oligonucleotide
  misc_feature (1)..(1): BNA scaffold modification
  misc_feature (7)..(7): BNA scaffold modification
  misc_feature (20)..(20): BNA scaffold modification
acccuccuuccaugacucaa

SEQ ID NO: 5523 - RNA, 20 nt, Artificial Sequence
  Antisense oligonucleotide
  misc_feature (1)..(1): BNA scaffold modification
  misc_feature (4)..(4): BNA scaffold modification
  misc_feature (20)..(20): BNA scaffold modification
acccuccuuccaugacucaa

SEQ ID NO: 5524 - RNA, 20 nt, Artificial Sequence
  Antisense oligonucleotide
  misc_feature (1)..(1): BNA scaffold modification
  misc_feature (14)..(14): BNA scaffold modification
  misc_feature (18)..(18): BNA scaffold modification
  misc_feature (20)..(20): BNA scaffold modification
acccuccuuccaugacucaa

SEQ ID NO: 5525 - RNA, 20 nt, Artificial Sequence
  Antisense oligonucleotide
  misc_feature (1)..(1): BNA scaffold modification
  misc_feature (11)..(11): BNA scaffold modification
  misc_feature (16)..(16): BNA scaffold modification
  misc_feature (20)..(20): BNA scaffold modification
acccuccuuccaugacucaa

SEQ ID NO: 5526 - RNA, 20 nt, Artificial Sequence
  Antisense oligonucleotide
  misc_feature (1)..(1): BNA scaffold modification
  misc_feature (4)..(4): BNA scaffold modification
  misc_feature (11)..(11): BNA scaffold modification
  misc_feature (20)..(20): BNA scaffold modification
acccuccuuccaugacucaa

SEQ ID NO: 5527 - RNA, 20 nt, Artificial Sequence
  Antisense oligonucleotide
  misc_feature (1)..(1): BNA scaffold modification
  misc_feature (18)..(20): BNA scaffold modification
acccuccuuccaugacucaa

SEQ ID NO: 5528 - RNA, 20 nt, Artificial Sequence
  Antisense oligonucleotide
  misc_feature (1)..(2): BNA scaffold modification
  misc_feature (18)..(18): BNA scaffold modification
  misc_feature (20)..(20): BNA scaffold modification
acccuccuuccaugacucaa

SEQ ID NO: 5529 - RNA, 20 nt, Artificial Sequence
  Antisense oligonucleotide
  misc_feature (1)..(2): BNA scaffold modification
  misc_feature (19)..(20): BNA scaffold modification
acccuccuuccaugacucaa

SEQ ID NO: 5530 - RNA, 20 nt, Artificial Sequence
  Antisense oligonucleotide
  misc_feature (1)..(2): BNA scaffold modification
  misc_feature (7)..(7): BNA scaffold modification
  misc_feature (14)..(14): BNA scaffold modification
  misc_feature (18)..(20): BNA scaffold modification
acccuccuuccaugacucaa

SEQ ID NO: 5531 - RNA, 20 nt, Artificial Sequence
  Antisense oligonucleotide
  misc_feature (1)..(1): BNA scaffold modification
  misc_feature (20)..(20): BNA scaffold modification
cccuccuuccaugacucaag

SEQ ID NO: 5532 - RNA, 20 nt, Artificial Sequence
  Antisense oligonucleotide
  misc_feature (1)..(1): BNA scaffold modification
  misc_feature (17)..(17): BNA scaffold modification
  misc_feature (20)..(20): BNA scaffold modification
cccuccuuccaugacucaag

SEQ ID NO: 5533 - RNA, 20 nt, Artificial Sequence
  Antisense oligonucleotide
  misc_feature (1)..(1): BNA scaffold modification
  misc_feature (15)..(15): BNA scaffold modification
  misc_feature (20)..(20): BNA scaffold modification
cccuccuuccaugacucaag

SEQ ID NO: 5534 - RNA, 20 nt, Artificial Sequence
  Antisense oligonucleotide
  misc_feature (1)..(1): BNA scaffold modification
  misc_feature (13)..(13): BNA scaffold modification
  misc_feature (20)..(20): BNA scaffold modification
cccuccuuccaugacucaag

SEQ ID NO: 5535 - RNA, 20 nt, Artificial Sequence
  Antisense oligonucleotide
  misc_feature (1)..(1): BNA scaffold modification
  misc_feature (10)..(10): BNA scaffold modification
  misc_feature (20)..(20): BNA scaffold modification
cccuccuuccaugacucaag

SEQ ID NO: 5536 - RNA, 20 nt, Artificial Sequence
  Antisense oligonucleotide
  misc_feature (1)..(1): BNA scaffold modification
  misc_feature (6)..(6): BNA scaffold modification
  misc_feature (20)..(20): BNA scaffold modification
cccuccuuccaugacucaag

SEQ ID NO: 5537 - RNA, 20 nt, Artificial Sequence
  Antisense oligonucleotide
  misc_feature (1)..(1): BNA scaffold modification
  misc_feature (3)..(3): BNA scaffold modification
  misc_feature (20)..(20): BNA scaffold modification
cccuccuuccaugacucaag

SEQ ID NO: 5538 - RNA, 20 nt, Artificial Sequence
  Antisense oligonucleotide
  misc_feature (1)..(1): BNA scaffold modification
  misc_feature (13)..(13): BNA scaffold modification
  misc_feature (17)..(17): BNA scaffold modification
  misc_feature (20)..(20): BNA scaffold modification
cccuccuuccaugacucaag

SEQ ID NO: 5539 - RNA, 20 nt, Artificial Sequence
  Antisense oligonucleotide
  misc_feature (1)..(1): BNA scaffold modification
  misc_feature (10)..(10): BNA scaffold modification
  misc_feature (15)..(15): BNA scaffold modification
  misc_feature (20)..(20): BNA scaffold modification
cccuccuuccaugacucaag

SEQ ID NO: 5540 - RNA, 20 nt, Artificial Sequence
  Antisense oligonucleotide
  misc_feature (1)..(1): BNA scaffold modification
  misc_feature (20)..(20): BNA scaffold modification
cccuccuuccaugacucaag

SEQ ID NO: 5541 - RNA, 20 nt, Artificial Sequence
  Antisense oligonucleotide
  misc_feature (1)..(1): BNA scaffold modification
  misc_feature (6)..(6): BNA scaffold modification
  misc_feature (10)..(10): BNA scaffold modification
  misc_feature (20)..(20): BNA scaffold modification
cccuccuuccaugacucaag

SEQ ID NO: 5542 - RNA, 20 nt, Artificial Sequence
  Antisense oligonucleotide
  misc_feature (1)..(1): BNA scaffold modification
  misc_feature (19)..(20): BNA scaffold modification
cccuccuuccaugacucaag

SEQ ID NO: 5543 - RNA, 20 nt, Artificial Sequence
  Antisense oligonucleotide
  misc_feature (1)..(2): BNA scaffold modification
  misc_feature (19)..(20): BNA scaffold modification
cccuccuuccaugacucaag

SEQ ID NO: 5544 - RNA, 20 nt, Artificial Sequence
  Antisense oligonucleotide
  misc_feature (1)..(2): BNA scaffold modification
  misc_feature (6)..(6): BNA scaffold modification
  misc_feature (13)..(13): BNA scaffold modification
  misc_feature (19)..(20): BNA scaffold modification
cccuccuuccaugacucaag

SEQ ID NO: 5545 - RNA, 20 nt, Artificial Sequence
  Antisense oligonucleotide
  misc_feature (1)..(1): BNA scaffold modification
  misc_feature (20)..(20): BNA scaffold modification
ccuccuuccaugacucaagc

SEQ ID NO: 5546 - RNA, 20 nt, Artificial Sequence
  Antisense oligonucleotide
  misc_feature (1)..(1): BNA scaffold modification
  misc_feature (19)..(20): BNA scaffold modification
ccuccuuccaugacucaagc

SEQ ID NO: 5547 - RNA, 20 nt, Artificial Sequence
  Antisense oligonucleotide
  misc_feature (1)..(1): BNA scaffold modification
  misc_feature (16)..(16): BNA scaffold modification
  misc_feature (20)..(20): BNA scaffold modification
ccuccuuccaugacucaagc

SEQ ID NO: 5548 - RNA, 20 nt, Artificial Sequence
  Antisense oligonucleotide
  misc_feature (1)..(1): BNA scaffold modification
  misc_feature (14)..(14): BNA scaffold modification
  misc_feature (20)..(20): BNA scaffold modification
ccuccuuccaugacucaagc

SEQ ID NO: 5549 - RNA, 20 nt, Artificial Sequence
  Antisense oligonucleotide
  misc_feature (1)..(1): BNA scaffold modification
  misc_feature (12)..(12): BNA scaffold modification
  misc_feature (20)..(20): BNA scaffold modification
ccuccuuccaugacucaagc

SEQ ID NO: 5550 - RNA, 20 nt, Artificial Sequence
  Antisense oligonucleotide
  misc_feature (1)..(1): BNA scaffold modification
  misc_feature (9)..(9): BNA scaffold modification
  misc_feature (20)..(20): BNA scaffold modification
ccuccuuccaugacucaagc

SEQ ID NO: 5551 - RNA, 20 nt, Artificial Sequence
  Antisense oligonucleotide
  misc_feature (1)..(1): BNA scaffold modification
  misc_feature (5)..(5): BNA scaffold modification
  misc_feature (20)..(20): BNA scaffold modification
ccuccuuccaugacucaagc

SEQ ID NO: 5552 - RNA, 20 nt, Artificial Sequence
  Antisense oligonucleotide
  misc_feature (1)..(2): BNA scaffold modification
  misc_feature (20)..(20): BNA scaffold modification
ccuccuuccaugacucaagc

SEQ ID NO: 5553 - RNA, 20 nt, Artificial Sequence
  Antisense oligonucleotide
  misc_feature (1)..(1): BNA scaffold modification
  misc_feature (12)..(12): BNA scaffold modification
  misc_feature (19)..(20): BNA scaffold modification
ccuccuuccaugacucaagc

SEQ ID NO: 5554 - RNA, 20 nt, Artificial Sequence
  Antisense oligonucleotide
  misc_feature (1)..(1): BNA scaffold modification
  misc_feature (9)..(9): BNA scaffold modification
  misc_feature (16)..(16): BNA scaffold modification
  misc_feature (20)..(20): BNA scaffold modification
ccuccuuccaugacucaagc

SEQ ID NO: 5555 - RNA, 20 nt, Artificial Sequence
  Antisense oligonucleotide
  misc_feature (1)..(1): BNA scaffold modification
  misc_feature (5)..(5): BNA scaffold modification
  misc_feature (9)..(9): BNA scaffold modification
  misc_feature (20)..(20): BNA scaffold modification
ccuccuuccaugacucaagc

SEQ ID NO: 5556 - RNA, 20 nt, Artificial Sequence
  Antisense oligonucleotide
  misc_feature (1)..(2): BNA scaffold modification
  misc_feature (19)..(20): BNA scaffold modification
ccuccuuccaugacucaagc

SEQ ID NO: 5557 - RNA, 20 nt, Artificial Sequence
  Antisense oligonucleotide
  misc_feature (1)..(1): BNA scaffold modification
  misc_feature (12)..(12): BNA scaffold modification
  misc_feature (16)..(16): BNA scaffold modification
  misc_feature (19)..(20): BNA scaffold modification
ccuccuuccaugacucaagc

SEQ ID NO: 5558 - RNA, 20 nt, Artificial Sequence
  Antisense oligonucleotide
  misc_feature (1)..(1): BNA scaffold modification
  misc_feature (9)..(9): BNA scaffold modification
  misc_feature (14)..(14): BNA scaffold modification
  misc_feature (19)..(20): BNA scaffold modification
ccuccuuccaugacucaagc

SEQ ID NO: 5559 - RNA, 20 nt, Artificial Sequence
  Antisense oligonucleotide
  misc_feature (1)..(1): BNA scaffold modification
  misc_feature (20)..(20): BNA scaffold modification
cuccuuccaugacucaagct

SEQ ID NO: 5560 - RNA, 20 nt, Artificial Sequence
  Antisense oligonucleotide
  misc_feature (1)..(1): BNA scaffold modification
  misc_feature (18)..(18): BNA scaffold modification
  misc_feature (20)..(20): BNA scaffold modification
cuccuuccaugacucaagct

SEQ ID NO: 5561 - RNA, 20 nt, Artificial Sequence
  Antisense oligonucleotide
  misc_feature (1)..(1): BNA scaffold modification
  misc_feature (15)..(15): BNA scaffold modification
  misc_feature (20)..(20): BNA scaffold modification
cuccuuccaugacucaagct

SEQ ID NO: 5562 - RNA, 20 nt, Artificial Sequence
  Antisense oligonucleotide
  misc_feature (1)..(1): BNA scaffold modification
  misc_feature (13)..(13): BNA scaffold modification
  misc_feature (20)..(20): BNA scaffold modification
cuccuuccaugacucaagct

SEQ ID NO: 5563 - RNA, 20 nt, Artificial Sequence
  Antisense oligonucleotide
  misc_feature (1)..(1): BNA scaffold modification
  misc_feature (11)..(11): BNA scaffold modification
  misc_feature (20)..(20): BNA scaffold modification
cuccuuccaugacucaagct

SEQ ID NO: 5564 - RNA, 20 nt, Artificial Sequence
  Antisense oligonucleotide
  misc_feature (1)..(1): BNA scaffold modification
  misc_feature (8)..(8): BNA scaffold modification
  misc_feature (20)..(20): BNA scaffold modification
cuccuuccaugacucaagct

SEQ ID NO: 5565 - RNA, 20 nt, Artificial Sequence
  Antisense oligonucleotide
  misc_feature (1)..(1): BNA scaffold modification
  misc_feature (4)..(4): BNA scaffold modification
  misc_feature (20)..(20): BNA scaffold modification
cuccuuccaugacucaagct

SEQ ID NO: 5566 - RNA, 20 nt, Artificial Sequence
  Antisense oligonucleotide
  misc_feature (1)..(1): BNA scaffold modification
  misc_feature (11)..(11): BNA scaffold modification
  misc_feature (18)..(18): BNA scaffold modification
  misc_feature (20)..(20): BNA scaffold modification
cuccuuccaugacucaagct

SEQ ID NO: 5567 - RNA, 20 nt, Artificial Sequence
  Antisense oligonucleotide
  misc_feature (1)..(1): BNA scaffold modification
  misc_feature (8)..(8): BNA scaffold modification
  misc_feature (15)..(15): BNA scaffold modification
  misc_feature (20)..(20): BNA scaffold modification
cuccuuccaugacucaagct

SEQ ID NO: 5568 - RNA, 20 nt, Artificial Sequence
  Antisense oligonucleotide
  misc_feature (1)..(1): BNA scaffold modification
  misc_feature (7)..(7): BNA scaffold modification
  misc_feature (13)..(13): BNA scaffold modification
  misc_feature (20)..(20): BNA scaffold modification
cuccuuccaugacucaagct

SEQ ID NO: 5569 - RNA, 20 nt, Artificial Sequence
  Antisense oligonucleotide
  misc_feature (1)..(1): BNA scaffold modification
  misc_feature (19)..(20): BNA scaffold modification
cuccuuccaugacucaagct

SEQ ID NO: 5570 - RNA, 20 nt, Artificial Sequence
  Antisense oligonucleotide
  misc_feature (1)..(2): BNA scaffold modification
  misc_feature (19)..(20): BNA scaffold modification
ctccuuccaugacucaagct

SEQ ID NO: 5571 - RNA, 20 nt, Artificial Sequence
  Antisense oligonucleotide
  misc_feature (1)..(1): BNA scaffold modification
  misc_feature (11)..(11): BNA scaffold modification
  misc_feature (15)..(15): BNA scaffold modification
  misc_feature (19)..(20): BNA scaffold modification
cuccuuccaugacucaagct

SEQ ID NO: 5572 - RNA, 20 nt, Artificial Sequence
  Antisense oligonucleotide
  misc_feature (1)..(1): BNA scaffold modification
  misc_feature (11)..(11): BNA scaffold modification
  misc_feature (15)..(15): BNA scaffold modification
  misc_feature (18)..(20): BNA scaffold modification
cuccuuccaugacucaagct

SEQ ID NO: 5573 - RNA, 18 nt, Artificial Sequence
  Antisense oligonucleotide
  misc_feature (1)..(1): BNA scaffold modification
  misc_feature (18)..(18): BNA scaffold modification
gacccuccuuccaugact

SEQ ID NO: 5574 - RNA, 18 nt, Artificial Sequence
  Antisense oligonucleotide
  misc_feature (1)..(1): BNA scaffold modification
  misc_feature (15)..(15): BNA scaffold modification
  misc_feature (18)..(18): BNA scaffold modification
gacccuccuuccaugact

SEQ ID NO: 5575 - RNA, 18 nt, Artificial Sequence
  Antisense oligonucleotide
  misc_feature (1)..(1): BNA scaffold modification
  misc_feature (12)..(12): BNA scaffold modification
  misc_feature (18)..(18): BNA scaffold modification
gacccuccuuccaugact

SEQ ID NO: 5576 - RNA, 18 nt, Artificial Sequence
  Antisense oligonucleotide
  misc_feature (1)..(1): BNA scaffold modification
  misc_feature (8)..(8): BNA scaffold modification
  misc_feature (18)..(18): BNA scaffold modification
gacccuccuuccaugact

SEQ ID NO: 5577 - RNA, 18 nt, Artificial Sequence
  Antisense oligonucleotide
  misc_feature (1)..(1): BNA scaffold modification
  misc_feature (5)..(5): BNA scaffold modification
  misc_feature (18)..(18): BNA scaffold modification
gacccuccuuccaugact

SEQ ID NO: 5578 - RNA, 18 nt, Artificial Sequence
  Antisense oligonucleotide
  misc_feature (1)..(1): BNA scaffold modification
  misc_feature (8)..(8): BNA scaffold modification
  misc_feature (15)..(15): BNA scaffold modification
  misc_feature (18)..(18): BNA scaffold modification
gacccuccuuccaugact

SEQ ID NO: 5579 - RNA, 18 nt, Artificial Sequence
  Antisense oligonucleotide
  misc_feature (1)..(1): BNA scaffold modification
  misc_feature (5)..(5): BNA scaffold modification
  misc_feature (12)..(12): BNA scaffold modification
  misc_feature (18)..(18): BNA scaffold modification
gacccuccuuccaugact

SEQ ID NO: 5580 - RNA, 18 nt, Artificial Sequence
  Antisense oligonucleotide
  misc_feature (1)..(1): BNA scaffold modification
  misc_feature (17)..(18): BNA scaffold modification
gacccuccuuccaugact

SEQ ID NO: 5581 - RNA, 18 nt, Artificial Sequence
  Antisense oligonucleotide
  misc_feature (1)..(1): BNA scaffold modification
  misc_feature (12)..(12): BNA scaffold modification
  misc_feature (15)..(15): BNA scaffold modification
  misc_feature (17)..(18): BNA scaffold modification
gacccuccuuccaugact

SEQ ID NO: 5582 - RNA, 18 nt, Artificial Sequence
  Antisense oligonucleotide
  misc_feature (1)..(2): BNA scaffold modification
  misc_feature (12)..(12): BNA scaffold modification
  misc_feature (17)..(18): BNA scaffold modification
gacccuccuuccaugact

SEQ ID NO: 5583 - RNA, 18 nt, Artificial Sequence
  Antisense oligonucleotide
  misc_feature (1)..(2): BNA scaffold modification
  misc_feature (8)..(8): BNA scaffold modification
  misc_feature (17)..(18): BNA scaffold modification
gacccuccuuccaugact

SEQ ID NO: 5584 - RNA, 18 nt, Artificial Sequence
  Antisense oligonucleotide
  misc_feature (1)..(1): BNA scaffold modification
  misc_feature (18)..(18): BNA scaffold modification
acccuccuuccaugacuc

SEQ ID NO: 5585 - RNA, 18 nt, Artificial Sequence
  Antisense oligonucleotide
  misc_feature (1)..(1): BNA scaffold modification
  misc_feature (16)..(16): BNA scaffold modification
  misc_feature (18)..(18): BNA scaffold modification
acccuccuuccaugacuc

SEQ ID NO: 5586 - RNA, 18 nt, Artificial Sequence
  Antisense oligonucleotide
  misc_feature (1)..(1): BNA scaffold modification
  misc_feature (14)..(14): BNA scaffold modification
  misc_feature (18)..(18): BNA scaffold modification
acccuccuuccaugacuc

SEQ ID NO: 5587 - RNA, 18 nt, Artificial Sequence
  Antisense oligonucleotide
  misc_feature (1)..(1): BNA scaffold modification
  misc_feature (11)..(11): BNA scaffold modification
  misc_feature (18)..(18): BNA scaffold modification
acccuccuuccaugacuc

SEQ ID NO: 5588 - RNA, 18 nt, Artificial Sequence
  Antisense oligonucleotide
  misc_feature (1)..(1): BNA scaffold modification
  misc_feature (18)..(18): BNA scaffold modification
acccuccuuccaugacuc

SEQ ID NO: 5589 - RNA, 18 nt, Artificial Sequence
  Antisense oligonucleotide
  misc_feature (1)..(1): BNA scaffold modification
  misc_feature (7)..(7): BNA scaffold modification
  misc_feature (18)..(18): BNA scaffold modification
acccuccuuccaugacuc

SEQ ID NO: 5590 - RNA, 18 nt, Artificial Sequence
  Antisense oligonucleotide
  misc_feature (1)..(1): BNA scaffold modification
  misc_feature (4)..(4): BNA scaffold modification
  misc_feature (18)..(18): BNA scaffold modification
acccuccuuccaugacuc

SEQ ID NO: 5591 - RNA, 18 nt, Artificial Sequence
  Antisense oligonucleotide
  misc_feature (1)..(1): BNA scaffold modification
  misc_feature (7)..(7): BNA scaffold modification
  misc_feature (16)..(16): BNA scaffold modification
  misc_feature (18)..(18): BNA scaffold modification
acccuccuuccaugacuc

SEQ ID NO: 5592 - RNA, 18 nt, Artificial Sequence
  Antisense oligonucleotide
  misc_feature (1)..(1): BNA scaffold modification
  misc_feature (4)..(4): BNA scaffold modification
  misc_feature (14)..(14): BNA scaffold modification
  misc_feature (18)..(18): BNA scaffold modification
acccuccuuccaugacuc

SEQ ID NO: 5593 - RNA, 18 nt, Artificial Sequence
  Antisense oligonucleotide
  misc_feature (1)..(1): BNA scaffold modification
  misc_feature (17)..(18): BNA scaffold modification
acccuccuuccaugactc

SEQ ID NO: 5594 - RNA, 18 nt, Artificial Sequence
  Antisense oligonucleotide
  misc_feature (1)..(2): BNA scaffold modification
  misc_feature (17)..(18): BNA scaffold modification
acccuccuuccaugactc

SEQ ID NO: 5595 - RNA, 18 nt, Artificial Sequence
  Antisense oligonucleotide
  misc_feature (1)..(2): BNA scaffold modification
  misc_feature (14)..(14): BNA scaffold modification
  misc_feature (17)..(18): BNA scaffold modification
acccuccuuccaugactc

SEQ ID NO: 5596 - RNA, 18 nt, Artificial Sequence
  Antisense oligonucleotide
  misc_feature (1)..(2): BNA scaffold modification
  misc_feature (7)..(7): BNA scaffold modification
  misc_feature (14)..(14): BNA scaffold modification
  misc_feature (17)..(18): BNA scaffold modification
acccuccuuccaugactc

SEQ ID NO: 5597 - RNA, 18 nt, Artificial Sequence
  Antisense oligonucleotide
  misc_feature (1)..(1): BNA scaffold modification
  misc_feature (18)..(18): BNA scaffold modification
cccuccuuccaugacuca

SEQ ID NO: 5598 - RNA, 18 nt, Artificial Sequence
  Antisense oligonucleotide
  misc_feature (1)..(1): BNA scaffold modification
  misc_feature (15)..(15): BNA scaffold modification
  misc_feature (18)..(18): BNA scaffold modification
cccuccuuccaugacuca

SEQ ID NO: 5599 - RNA, 18 nt, Artificial Sequence
  Antisense oligonucleotide
  misc_feature (1)..(1): BNA scaffold modification
  misc_feature (13)..(13): BNA scaffold modification
  misc_feature (18)..(18): BNA scaffold modification
cccuccuuccaugacuca

SEQ ID NO: 5600 - RNA, 18 nt, Artificial Sequence
  Antisense oligonucleotide
  misc_feature (1)..(1): BNA scaffold modification
  misc_feature (10)..(10): BNA scaffold modification
  misc_feature (18)..(18): BNA scaffold modification
cccuccuuccaugacuca

SEQ ID NO: 5601 - RNA, 18 nt, Artificial Sequence
  Antisense oligonucleotide
  misc_feature (1)..(1): BNA scaffold modification
  misc_feature (6)..(6): BNA scaffold modification
  misc_feature (18)..(18): BNA scaffold modification
cccuccuuccaugacuca

SEQ ID NO: 5602 - RNA, 18 nt, Artificial Sequence
  Antisense oligonucleotide
  misc_feature (1)..(1): BNA scaffold modification
  misc_feature (3)..(3): BNA scaffold modification
  misc_feature (18)..(18): BNA scaffold modification
cccuccuuccaugacuca

SEQ ID NO: 5603 - RNA, 18 nt, Artificial Sequence
  Antisense oligonucleotide
  misc_feature (1)..(1): BNA scaffold modification
  misc_feature (10)..(10): BNA scaffold modification
  misc_feature (17)..(18): BNA scaffold modification
cccuccuuccaugacuca

SEQ ID NO: 5604 - RNA, 18 nt, Artificial Sequence
  Antisense oligonucleotide
  misc_feature (1)..(1): BNA scaffold modification
  misc_feature (6)..(6): BNA scaffold modification
  misc_feature (15)..(15): BNA scaffold modification
  misc_feature (18)..(18): BNA scaffold modification
cccuccuuccaugacuca

SEQ ID NO: 5605 - RNA, 18 nt, Artificial Sequence
  Antisense oligonucleotide
  misc_feature (1)..(1): BNA scaffold modification
  misc_feature (13)..(13): BNA scaffold modification
  misc_feature (17)..(18): BNA scaffold modification
cccuccuuccaugacuca

SEQ ID NO: 5606 - RNA, 18 nt, Artificial Sequence
  Antisense oligonucleotide
  misc_feature (1)..(2): BNA scaffold modification
  misc_feature (17)..(18): BNA scaffold modification
cccuccuuccaugacuca

SEQ ID NO: 5607 - RNA, 18 nt, Artificial Sequence
  Antisense oligonucleotide
  misc_feature (1)..(2): BNA scaffold modification
  misc_feature (13)..(13): BNA scaffold modification
  misc_feature (17)..(18): BNA scaffold modification
cccuccuuccaugacuca

SEQ ID NO: 5608 - RNA, 18 nt, Artificial Sequence
  Antisense oligonucleotide
  misc_feature (1)..(1): BNA scaffold modification
  misc_feature (18)..(18): BNA scaffold modification
ccuccuuccaugacucaa

SEQ ID NO: 5609 - RNA, 18 nt, Artificial Sequence
  Antisense oligonucleotide
  misc_feature (1)..(1): BNA scaffold modification
  misc_feature (16)..(16): BNA scaffold modification
  misc_feature (18)..(18): BNA scaffold modification
ccuccuuccaugacucaa

SEQ ID NO: 5610 - RNA, 18 nt, Artificial Sequence
  Antisense oligonucleotide
  misc_feature (1)..(1): BNA scaffold modification
  misc_feature (14)..(14): BNA scaffold modification
  misc_feature (18)..(18): BNA scaffold modification
ccuccuuccaugacucaa

SEQ ID NO: 5611 - RNA, 18 nt, Artificial Sequence
  Antisense oligonucleotide
  misc_feature (1)..(1): BNA scaffold modification
  misc_feature (12)..(12): BNA scaffold modification
  misc_feature (18)..(18): BNA scaffold modification
ccuccuuccaugacucaa

SEQ ID NO: 5612 - RNA, 18 nt, Artificial Sequence
  Antisense oligonucleotide
  misc_feature (1)..(1): BNA scaffold modification
  misc_feature (9)..(9): BNA scaffold modification
  misc_feature (18)..(18): BNA scaffold modification
ccuccuuccaugacucaa

SEQ ID NO: 5613 - RNA, 18 nt, Artificial Sequence
  Antisense oligonucleotide
  misc_feature (1)..(1): BNA scaffold modification
  misc_feature (5)..(5): BNA scaffold modification
  misc_feature (18)..(18): BNA scaffold modification
ccuccuuccaugacucaa

SEQ ID NO: 5614 - RNA, 18 nt, Artificial Sequence
  Antisense oligonucleotide
  misc_feature (1)..(1): BNA scaffold modification
  misc_feature (5)..(5): BNA scaffold modification
  misc_feature (14)..(14): BNA scaffold modification
  misc_feature (18)..(18): BNA scaffold modification
ccuccuuccaugacucaa

SEQ ID NO: 5615 - RNA, 18 nt, Artificial Sequence
  Antisense oligonucleotide
  misc_feature (1)..(1): BNA scaffold modification
  misc_feature (9)..(9): BNA scaffold modification
  misc_feature (12)..(12): BNA scaffold modification
  misc_feature (18)..(18): BNA scaffold modification
ccuccuuccaugacucaa

SEQ ID NO: 5616 - RNA, 18 nt, Artificial Sequence
  Antisense oligonucleotide
  misc_feature (1)..(1): BNA scaffold modification
  misc_feature (9)..(9): BNA scaffold modification
  misc_feature (16)..(16): BNA scaffold modification
  misc_feature (18)..(18): BNA scaffold modification
ccuccuuccaugacucaa

SEQ ID NO: 5617 - RNA, 18 nt, Artificial Sequence
  Antisense oligonucleotide
  misc_feature (1)..(1): BNA scaffold modification
  misc_feature (5)..(5): BNA scaffold modification
  misc_feature (12)..(12): BNA scaffold modification
  misc_feature (18)..(18): BNA scaffold modification
ccuccuuccaugacucaa

SEQ ID NO: 5618 - RNA, 18 nt, Artificial Sequence
  Antisense oligonucleotide
  misc_feature (1)..(2): BNA scaffold modification
  misc_feature (17)..(18): BNA scaffold modification
ccuccuuccaugacucaa

SEQ ID NO: 5619 - RNA, 18 nt, Artificial Sequence
  Antisense oligonucleotide
  misc_feature (1)..(2): BNA scaffold modification
  misc_feature (12)..(12): BNA scaffold modification
  misc_feature (17)..(18): BNA scaffold modification
ccuccuuccaugacucaa

SEQ ID NO: 5620 - RNA, 18 nt, Artificial Sequence
  Antisense oligonucleotide
  misc_feature (1)..(2): BNA scaffold modification
  misc_feature (16)..(18): BNA scaffold modification
ccuccuuccaugacucaa

SEQ ID NO: 5621 - RNA, 18 nt, Artificial Sequence
  Antisense oligonucleotide
  misc_feature (1)..(2): BNA scaffold modification
  misc_feature (5)..(5): BNA scaffold modification
  misc_feature (12)..(12): BNA scaffold modification
  misc_feature (17)..(18): BNA scaffold modification
ccuccuuccaugacucaa

SEQ ID NO: 5622 - RNA, 18 nt, Artificial Sequence
  Antisense oligonucleotide
  misc_feature (1)..(1): BNA scaffold modification
  misc_feature (18)..(18): BNA scaffold modification
cuccuuccaugacucaag

SEQ ID NO: 5623 - RNA, 18 nt, Artificial Sequence
  Antisense oligonucleotide
  misc_feature (1)..(1): BNA scaffold modification
  misc_feature (15)..(15): BNA scaffold modification
  misc_feature (18)..(18): BNA scaffold modification
cuccuuccaugacucaag

SEQ ID NO: 5624 - RNA, 18 nt, Artificial Sequence
  Antisense oligonucleotide
  misc_feature (1)..(1): BNA scaffold modification
  misc_feature (13)..(13): BNA scaffold modification
  misc_feature (18)..(18): BNA scaffold modification
cuccuuccaugacucaag

SEQ ID NO: 5625 - RNA, 18 nt, Artificial Sequence
  Antisense oligonucleotide
  misc_feature (1)..(1): BNA scaffold modification
  misc_feature (11)..(11): BNA scaffold modification
  misc_feature (18)..(18): BNA scaffold modification
cuccuuccaugacucaag

SEQ ID NO: 5626 - RNA, 18 nt, Artificial Sequence
  Antisense oligonucleotide
  misc_feature (1)..(1): BNA scaffold modification
  misc_feature (8)..(8): BNA scaffold modification
  misc_feature (18)..(18): BNA scaffold modification
cuccuuccaugacucaag

SEQ ID NO: 5627 - RNA, 18 nt, Artificial Sequence
  Antisense oligonucleotide
  misc_feature (1)..(1): BNA scaffold modification
  misc_feature (18)..(18): BNA scaffold modification
cuccuuccaugacucaag

SEQ ID NO: 5628 - RNA, 18 nt, Artificial Sequence
  Antisense oligonucleotide
  misc_feature (1)..(1): BNA scaffold modification
  misc_feature (4)..(4): BNA scaffold modification
  misc_feature (18)..(18): BNA scaffold modification
cuccuuccaugacucaag

SEQ ID NO: 5629 - RNA, 18 nt, Artificial Sequence
  Antisense oligonucleotide
  misc_feature (1)..(1): BNA scaffold modification
  misc_feature (11)..(11): BNA scaffold modification
  misc_feature (15)..(15): BNA scaffold modification
  misc_feature (18)..(18): BNA scaffold modification
cuccuuccaugacucaag

SEQ ID NO: 5630 - RNA, 18 nt, Artificial Sequence
  Antisense oligonucleotide
  misc_feature (1)..(1): BNA scaffold modification
  misc_feature (8)..(8): BNA scaffold modification
  misc_feature (13)..(13): BNA scaffold modification
  misc_feature (18)..(18): BNA scaffold modification
cuccuuccaugacucaag

SEQ ID NO: 5631 - RNA, 18 nt, Artificial Sequence
  Antisense oligonucleotide
  misc_feature (1)..(1): BNA scaffold modification
  misc_feature (4)..(4): BNA scaffold modification
  misc_feature (8)..(8): BNA scaffold modification
  misc_feature (18)..(18): BNA scaffold modification
cuccuuccaugacucaag

SEQ ID NO: 5632 - RNA, 18 nt, Artificial Sequence
  Antisense oligonucleotide
  misc_feature (1)..(1): BNA scaffold modification
  misc_feature (4)..(4): BNA scaffold modification
  misc_feature (15)..(15): BNA scaffold modification
  misc_feature (18)..(18): BNA scaffold modification
cuccuuccaugacucaag

SEQ ID NO: 5633 - RNA, 18 nt, Artificial Sequence
  Antisense oligonucleotide
  misc_feature (1)..(1): BNA scaffold modification
  misc_feature (17)..(18): BNA scaffold modification
cuccuuccaugacucaag

SEQ ID NO: 5634 - RNA, 18 nt, Artificial Sequence
  Antisense oligonucleotide
  misc_feature (1)..(2): BNA scaffold modification
  misc_feature (17)..(18): BNA scaffold modification
ctccuuccaugacucaag

SEQ ID NO: 5635 - RNA, 18 nt, Artificial Sequence
  Antisense oligonucleotide
  misc_feature (1)..(2): BNA scaffold modification
  misc_feature (11)..(11): BNA scaffold modification
  misc_feature (13)..(13): BNA scaffold modification
  misc_feature (15)..(15): BNA scaffold modification
  misc_feature (18)..(18): BNA scaffold modification
ctccuuccaugacucaag

SEQ ID NO: 5636 - RNA, 18 nt, Artificial Sequence
  Antisense oligonucleotide
  misc_feature (1)..(1): BNA scaffold modification
  misc_feature (18)..(18): BNA scaffold modification
tccuuccaugacucaagc

SEQ ID NO: 5637 - RNA, 18 nt, Artificial Sequence
  Antisense oligonucleotide
  misc_feature (1)..(1): BNA scaffold modification
  misc_feature (17)..(18): BNA scaffold modification
tccuuccaugacucaagc

SEQ ID NO: 5638 - RNA, 18 nt, Artificial Sequence
  Antisense oligonucleotide
  misc_feature (1)..(1): BNA scaffold modification
  misc_feature (14)..(14): BNA scaffold modification
  misc_feature (18)..(18): BNA scaffold modification
tccuuccaugacucaagc

SEQ ID NO: 5639 - RNA, 18 nt, Artificial Sequence
  Antisense oligonucleotide
  misc_feature (1)..(1): BNA scaffold modification
  misc_feature (12)..(12): BNA scaffold modification
  misc_feature (18)..(18): BNA scaffold modification
tccuuccaugacucaagc

SEQ ID NO: 5640 - RNA, 18 nt, Artificial Sequence
  Antisense oligonucleotide
  misc_feature (1)..(1): BNA scaffold modification
  misc_feature (10)..(10): BNA scaffold modification
  misc_feature (18)..(18): BNA scaffold modification
tccuuccaugacucaagc

SEQ ID NO: 5641 - RNA, 18 nt, Artificial Sequence
  Antisense oligonucleotide
  misc_feature (1)..(1): BNA scaffold modification
  misc_feature (7)..(7): BNA scaffold modification
  misc_feature (18)..(18): BNA scaffold modification
tccuuccaugacucaagc

SEQ ID NO: 5642 - RNA, 18 nt, Artificial Sequence
  Antisense oligonucleotide
  misc_feature (1)..(1): BNA scaffold modification
  misc_feature (3)..(3): BNA scaffold modification
  misc_feature (18)..(18): BNA scaffold modification
tccuuccaugacucaagc

SEQ ID NO: 5643 - RNA, 18 nt, Artificial Sequence
  Antisense oligonucleotide
  misc_feature (1)..(1): BNA scaffold modification
  misc_feature (10)..(10): BNA scaffold modification
  misc_feature (17)..(18): BNA scaffold modification
tccuuccaugacucaagc

SEQ ID NO: 5644 - RNA, 18 nt, Artificial Sequence
  Antisense oligonucleotide
  misc_feature (1)..(1): BNA scaffold modification
  misc_feature (7)..(7): BNA scaffold modification
  misc_feature (14)..(14): BNA scaffold modification
  misc_feature (18)..(18): BNA scaffold modification
tccuuccaugacucaagc

SEQ ID NO: 5645 - RNA, 18 nt, Artificial Sequence
  Antisense oligonucleotide
  misc_feature (1)..(1): BNA scaffold modification
  misc_feature (3)..(3): BNA scaffold modification
  misc_feature (12)..(12): BNA scaffold modification
  misc_feature (18)..(18): BNA scaffold modification
tccuuccaugacucaagc

SEQ ID NO: 5646 - RNA, 18 nt, Artificial Sequence
  Antisense oligonucleotide
  misc_feature (1)..(1): BNA scaffold modification
  misc_feature (17)..(18): BNA scaffold modification
tccuuccaugacucaagc

SEQ ID NO: 5647 - RNA, 18 nt, Artificial Sequence
  Antisense oligonucleotide
  misc_feature (1)..(2): BNA scaffold modification
  misc_feature (17)..(18): BNA scaffold modification
tccuuccaugacucaagc

SEQ ID NO: 5648 - RNA, 18 nt, Artificial Sequence
  Antisense oligonucleotide
  misc_feature (1)..(2): BNA scaffold modification
  misc_feature (10)..(10): BNA scaffold modification
  misc_feature (17)..(18): BNA scaffold modification
tccuuccaugacucaagc

SEQ ID NO: 5649 - RNA, 18 nt, Artificial Sequence
  Antisense oligonucleotide
  misc_feature (1)..(1): BNA scaffold modification
  misc_feature (18)..(18): BNA scaffold modification
ccuuccaugacucaagct

SEQ ID NO: 5650 - RNA, 18 nt, Artificial Sequence
  Antisense oligonucleotide
  misc_feature (1)..(1): BNA scaffold modification
  misc_feature (16)..(16): BNA scaffold modification
  misc_feature (18)..(18): BNA scaffold modification
ccuuccaugacucaagct

SEQ ID NO: 5651 - RNA, 18 nt, Artificial Sequence
  Antisense oligonucleotide
  misc_feature (1)..(1): BNA scaffold modification
  misc_feature (13)..(13): BNA scaffold modification
  misc_feature (18)..(18): BNA scaffold modification
ccuuccaugacucaagct

SEQ ID NO: 5652 - RNA, 18 nt, Artificial Sequence
  Antisense oligonucleotide
  misc_feature (1)..(1): BNA scaffold modification
  misc_feature (11)..(11): BNA scaffold modification
  misc_feature (18)..(18): BNA scaffold modification
ccuuccaugacucaagct

SEQ ID NO: 5653 - RNA, 18 nt, Artificial Sequence
  Antisense oligonucleotide
  misc_feature (1)..(1): BNA scaffold modification
  misc_feature (9)..(9): BNA scaffold modification
  misc_feature (18)..(18): BNA scaffold modification
ccuuccaugacucaagct

SEQ ID NO: 5654 - RNA, 18 nt, Artificial Sequence
  Antisense oligonucleotide
  misc_feature (1)..(1): BNA scaffold modification
  misc_feature (6)..(6): BNA scaffold modification
  misc_feature (18)..(18): BNA scaffold modification
ccuuccaugacucaagct

SEQ ID NO: 5655 - RNA, 18 nt, Artificial Sequence
  Antisense oligonucleotide
  misc_feature (1)..(1): BNA scaffold modification
  misc_feature (9)..(9): BNA scaffold modification
  misc_feature (16)..(16): BNA scaffold modification
  misc_feature (18)..(18): BNA scaffold modification
ccuuccaugacucaagct

SEQ ID NO: 5656 - RNA, 18 nt, Artificial Sequence
  Antisense oligonucleotide
  misc_feature (1)..(1): BNA scaffold modification
  misc_feature (6)..(6): BNA scaffold modification
  misc_feature (13)..(13): BNA scaffold modification
  misc_feature (18)..(18): BNA scaffold modification
ccuuccaugacucaagct

SEQ ID NO: 5657 - RNA, 18 nt, Artificial Sequence
  Antisense oligonucleotide
  misc_feature (1)..(2): BNA scaffold modification
  misc_feature (11)..(11): BNA scaffold modification
  misc_feature (18)..(18): BNA scaffold modification
ccuuccaugacucaagct

SEQ ID NO: 5658 - RNA, 18 nt, Artificial Sequence
  Antisense oligonucleotide
  misc_feature (1)..(1): BNA scaffold modification
  misc_feature (17)..(18): BNA scaffold modification
ccuuccaugacucaagct

SEQ ID NO: 5659 - RNA, 18 nt, Artificial Sequence
  Antisense oligonucleotide
  misc_feature (1)..(2): BNA scaffold modification
  misc_feature (17)..(18): BNA scaffold modification
ccuuccaugacucaagct

SEQ ID NO: 5660 - RNA, 18 nt, Artificial Sequence
  Antisense oligonucleotide
  misc_feature (1)..(2): BNA scaffold modification
  misc_feature (9)..(9): BNA scaffold modification
  misc_feature (17)..(18): BNA scaffold modification
ccuuccaugacucaagct

SEQ ID NO: 5661 - RNA, 18 nt, Artificial Sequence
  Antisense oligonucleotide
  misc_feature (1)..(1): BNA scaffold modification
  misc_feature (9)..(9): BNA scaffold modification
  misc_feature (16)..(18): BNA scaffold modification
ccuuccaugacucaagct

SEQ ID NO: 5662 - RNA, 16 nt, Artificial Sequence
  Antisense oligonucleotide
  misc_feature (1)..(1): BNA scaffold modification
  misc_feature (16)..(16): BNA scaffold modification
gacccuccuuccauga

SEQ ID NO: 5663 - RNA, 16 nt, Artificial Sequence
  Antisense oligonucleotide
  misc_feature (1)..(1): BNA scaffold modification
  misc_feature (15)..(16): BNA scaffold modification
gacccuccuuccauga

SEQ ID NO: 5664 - RNA, 16 nt, Artificial Sequence
  Antisense oligonucleotide
  misc_feature (1)..(1): BNA scaffold modification
  misc_feature (12)..(12): BNA scaffold modification
  misc_feature (16)..(16): BNA scaffold modification
gacccuccuuccauga

SEQ ID NO: 5665 - RNA, 16 nt, Artificial Sequence
  Antisense oligonucleotide
  misc_feature (1)..(1): BNA scaffold modification
  misc_feature (8)..(8): BNA scaffold modification
  misc_feature (16)..(16): BNA scaffold modification
gacccuccuuccauga

SEQ ID NO: 5666 - RNA, 16 nt, Artificial Sequence
  Antisense oligonucleotide
  misc_feature (1)..(1): BNA scaffold modification
  misc_feature (5)..(5): BNA scaffold modification
  misc_feature (16)..(16): BNA scaffold modification
gacccuccuuccauga

SEQ ID NO: 5667 - RNA, 16 nt, Artificial Sequence
  Antisense oligonucleotide
  misc_feature (1)..(1): BNA scaffold modification
  misc_feature (8)..(8): BNA scaffold modification
  misc_feature (15)..(16): BNA scaffold modification
gacccuccuuccauga

SEQ ID NO: 5668 - RNA, 16 nt, Artificial Sequence
  Antisense oligonucleotide
  misc_feature (1)..(1): BNA scaffold modification
  misc_feature (5)..(5): BNA scaffold modification
  misc_feature (12)..(12): BNA scaffold modification
  misc_feature (16)..(16): BNA scaffold modification
gacccuccuuccauga

SEQ ID NO: 5669 - RNA, 16 nt, Artificial Sequence
  Antisense oligonucleotide
  misc_feature (1)..(2): BNA scaffold modification
  misc_feature (15)..(16): BNA scaffold modification
gacccuccuuccauga

SEQ ID NO: 5670 - RNA, 16 nt, Artificial Sequence
  Antisense oligonucleotide
  misc_feature (1)..(1): BNA scaffold modification
  misc_feature (5)..(5): BNA scaffold modification
  misc_feature (12)..(12): BNA scaffold modification
  misc_feature (15)..(16): BNA scaffold modification
gacccuccuuccauga

SEQ ID NO: 5671 - RNA, 16 nt, Artificial Sequence
  Antisense oligonucleotide
  misc_feature (1)..(2): BNA scaffold modification
  misc_feature (16)..(16): BNA scaffold modification
gacccuccuuccauga

SEQ ID NO: 5672 - RNA, 16 nt, Artificial Sequence
  Antisense oligonucleotide
  misc_feature (1)..(1): BNA scaffold modification
  misc_feature (14)..(16): BNA scaffold modification
gacccuccuuccatga

SEQ ID NO: 5673 - RNA, 16 nt, Artificial Sequence
  Antisense oligonucleotide
  misc_feature (1)..(1): BNA scaffold modification
  misc_feature (16)..(16): BNA scaffold modification
acccuccuuccaugac

SEQ ID NO: 5674 - RNA, 16 nt, Artificial Sequence
  Antisense oligonucleotide
  misc_feature (1)..(1): BNA scaffold modification
  misc_feature (14)..(14): BNA scaffold modification
  misc_feature (16)..(16): BNA scaffold modification
acccuccuuccaugac

SEQ ID NO: 5675 - RNA, 16 nt, Artificial Sequence
  Antisense oligonucleotide
  misc_feature (1)..(1): BNA scaffold modification
  misc_feature (11)..(11): BNA scaffold modification
  misc_feature (16)..(16): BNA scaffold modification
acccuccuuccaugac

SEQ ID NO: 5676 - RNA, 16 nt, Artificial Sequence
  Antisense oligonucleotide
  misc_feature (1)..(1): BNA scaffold modification
  misc_feature (7)..(7): BNA scaffold modification
  misc_feature (16)..(16): BNA scaffold modification
acccuccuuccaugac

SEQ ID NO: 5677 - RNA, 16 nt, Artificial Sequence
  Antisense oligonucleotide
  misc_feature (1)..(1): BNA scaffold modification
  misc_feature (4)..(4): BNA scaffold modification
  misc_feature (16)..(16): BNA scaffold modification
acccuccuuccaugac

SEQ ID NO: 5678 - RNA, 16 nt, Artificial Sequence
  Antisense oligonucleotide
  misc_feature (1)..(1): BNA scaffold modification
  misc_feature (4)..(4): BNA scaffold modification
  misc_feature (10)..(10): BNA scaffold modification
  misc_feature (16)..(16): BNA scaffold modification
acccuccuuccaugac

SEQ ID NO: 5679 - RNA, 16 nt, Artificial Sequence
  Antisense oligonucleotide
  misc_feature (1)..(1): BNA scaffold modification
  misc_feature (7)..(7): BNA scaffold modification
  misc_feature (14)..(14): BNA scaffold modification
  misc_feature (16)..(16): BNA scaffold modification
acccuccuuccaugac

SEQ ID NO: 5680 - RNA, 16 nt, Artificial Sequence
  Antisense oligonucleotide
  misc_feature (1)..(1): BNA scaffold modification
  misc_feature (4)..(4): BNA scaffold modification
  misc_feature (11)..(11): BNA scaffold modification
  misc_feature (16)..(16): BNA scaffold modification
acccuccuuccaugac

SEQ ID NO: 5681 - RNA, 16 nt, Artificial Sequence
  Antisense oligonucleotide
  misc_feature (1)..(1): BNA scaffold modification
  misc_feature (15)..(16): BNA scaffold modification
acccuccuuccaugac

SEQ ID NO: 5682 - RNA, 16 nt, Artificial Sequence
  Antisense oligonucleotide
  misc_feature (1)..(2): BNA scaffold modification
  misc_feature (15)..(16): BNA scaffold modification
acccuccuuccaugac

SEQ ID NO: 5683 - RNA, 16 nt, Artificial Sequence
  Antisense oligonucleotide
  misc_feature (1)..(1): BNA scaffold modification
  misc_feature (7)..(7): BNA scaffold modification
  misc_feature (14)..(16): BNA scaffold modification
acccuccuuccaugac

SEQ ID NO: 5684 - RNA, 16 nt, Artificial Sequence
  Antisense oligonucleotide
  misc_feature (1)..(1): BNA scaffold modification
  misc_feature (16)..(16): BNA scaffold modification
cccuccuuccaugact

SEQ ID NO: 5685 - RNA, 16 nt, Artificial Sequence
  Antisense oligonucleotide
  misc_feature (1)..(1): BNA scaffold modification
  misc_feature (15)..(16): BNA scaffold modification
cccuccuuccaugact

SEQ ID NO: 5686 - RNA, 16 nt, Artificial Sequence
  Antisense oligonucleotide
  misc_feature (1)..(1): BNA scaffold modification
  misc_feature (13)..(13): BNA scaffold modification
  misc_feature (16)..(16): BNA scaffold modification
cccuccuuccaugact

SEQ ID NO: 5687 - RNA, 16 nt, Artificial Sequence
  Antisense oligonucleotide
  misc_feature (1)..(1): BNA scaffold modification
  misc_feature (10)..(10): BNA scaffold modification
  misc_feature (16)..(16): BNA scaffold modification
cccuccuuccaugact

SEQ ID NO: 5688 - RNA, 16 nt, Artificial Sequence
  Antisense oligonucleotide
  misc_feature (1)..(1): BNA scaffold modification
  misc_feature (6)..(6): BNA scaffold modification
  misc_feature (16)..(16): BNA scaffold modification
cccuccuuccaugact

SEQ ID NO: 5689 - RNA, 16 nt, Artificial Sequence
  Antisense oligonucleotide
  misc_feature (1)..(1): BNA scaffold modification
  misc_feature (3)..(3): BNA scaffold modification
  misc_feature (16)..(16): BNA scaffold modification
cccuccuuccaugact

SEQ ID NO: 5690 - RNA, 16 nt, Artificial Sequence
  Antisense oligonucleotide
  misc_feature (1)..(1): BNA scaffold modification
  misc_feature (13)..(13): BNA scaffold modification
  misc_feature (15)..(16): BNA scaffold modification
cccuccuuccaugact

SEQ ID NO: 5691 - RNA, 16 nt, Artificial Sequence
  Antisense oligonucleotide
  misc_feature (1)..(1): BNA scaffold modification
  misc_feature (6)..(6): BNA scaffold modification
  misc_feature (13)..(13): BNA scaffold modification
  misc_feature (16)..(16): BNA scaffold modification
cccuccuuccaugact

SEQ ID NO: 5692 - RNA, 16 nt, Artificial Sequence
  Antisense oligonucleotide
  misc_feature (1)..(1): BNA scaffold modification
  misc_feature (6)..(6): BNA scaffold modification
  misc_feature (10)..(10): BNA scaffold modification
  misc_feature (16)..(16): BNA scaffold modification
cccuccuuccaugact

SEQ ID NO: 5693 - RNA, 16 nt, Artificial Sequence
  Antisense oligonucleotide
  misc_feature (1)..(2): BNA scaffold modification
  misc_feature (15)..(16): BNA scaffold modification
cccuccuuccaugact

SEQ ID NO: 5694 - RNA, 16 nt, Artificial Sequence
  Antisense oligonucleotide
  misc_feature (1)..(1): BNA scaffold modification
  misc_feature (6)..(6): BNA scaffold modification
  misc_feature (13)..(13): BNA scaffold modification
  misc_feature (15)..(16): BNA scaffold modification
cccuccuuccaugact

SEQ ID NO: 5695 - RNA, 16 nt, Artificial Sequence
  Antisense oligonucleotide
  misc_feature (1)..(1): BNA scaffold modification
  misc_feature (16)..(16): BNA scaffold modification
ccuccuuccaugacuc

SEQ ID NO: 5696 - RNA, 16 nt, Artificial Sequence
  Antisense oligonucleotide
  misc_feature (1)..(1): BNA scaffold modification
  misc_feature (14)..(14): BNA scaffold modification
  misc_feature (16)..(16): BNA scaffold modification
ccuccuuccaugacuc

SEQ ID NO: 5697 - RNA, 16 nt, Artificial Sequence
  Antisense oligonucleotide
  misc_feature (1)..(1): BNA scaffold modification
  misc_feature (12)..(12): BNA scaffold modification
  misc_feature (16)..(16): BNA scaffold modification
ccuccuuccaugacuc

SEQ ID NO: 5698 - RNA, 16 nt, Artificial Sequence
  Antisense oligonucleotide
  misc_feature (1)..(1): BNA scaffold modification
  misc_feature (9)..(9): BNA scaffold modification
  misc_feature (16)..(16): BNA scaffold modification
ccuccuuccaugacuc

SEQ ID NO: 5699 - RNA, 16 nt, Artificial Sequence
  Antisense oligonucleotide
  misc_feature (1)..(1): BNA scaffold modification
  misc_feature (5)..(5): BNA scaffold modification
  misc_feature (16)..(16): BNA scaffold modification
ccuccuuccaugacuc

SEQ ID NO: 5700 - RNA, 16 nt, Artificial Sequence
  Antisense oligonucleotide
  misc_feature (1)..(2): BNA scaffold modification
  misc_feature (16)..(16): BNA scaffold modification
ccuccuuccaugacuc

SEQ ID NO: 5701 - RNA, 16 nt, Artificial Sequence
  Antisense oligonucleotide
  misc_feature (1)..(1): BNA scaffold modification
  misc_feature (9)..(9): BNA scaffold modification
  misc_feature (14)..(14): BNA scaffold modification
  misc_feature (16)..(16): BNA scaffold modification
ccuccuuccaugacuc

SEQ ID NO: 5702 - RNA, 16 nt, Artificial Sequence
  Antisense oligonucleotide
  misc_feature (1)..(1): BNA scaffold modification
  misc_feature (5)..(5): BNA scaffold modification
  misc_feature (12)..(12): BNA scaffold modification
  misc_feature (16)..(16): BNA scaffold modification
ccuccuuccaugacuc

SEQ ID NO: 5703 - RNA, 16 nt, Artificial Sequence
  Antisense oligonucleotide
  misc_feature (1)..(1): BNA scaffold modification
  misc_feature (8)..(8): BNA scaffold modification
  misc_feature (14)..(14): BNA scaffold modification
  misc_feature (16)..(16): BNA scaffold modification
ccuccuuccaugacuc

SEQ ID NO: 5704 - RNA, 16 nt, Artificial Sequence
  Antisense oligonucleotide
  misc_feature (1)..(1): BNA scaffold modification
  misc_feature (4)..(4): BNA scaffold modification
  misc_feature (12)..(12): BNA scaffold modification
  misc_feature (16)..(16): BNA scaffold modification
ccuccuuccaugacuc

SEQ ID NO: 5705 - RNA, 16 nt, Artificial Sequence
  Antisense oligonucleotide
  misc_feature (1)..(1): BNA scaffold modification
  misc_feature (15)..(16): BNA scaffold modification
ccuccuuccaugactc

SEQ ID NO: 5706 - RNA, 16 nt, Artificial Sequence
  Antisense oligonucleotide
  misc_feature (1)..(2): BNA scaffold modification
  misc_feature (15)..(16): BNA scaffold modification
ccuccuuccaugactc

SEQ ID NO: 5707 - RNA, 16 nt, Artificial Sequence
  Antisense oligonucleotide
  misc_feature (1)..(2): BNA scaffold modification
  misc_feature (8)..(9): BNA scaffold modification
  misc_feature (15)..(16): BNA scaffold modification
ccuccuuccaugactc

SEQ ID NO: 5708 - RNA, 16 nt, Artificial Sequence
  Antisense oligonucleotide
  misc_feature (1)..(1): BNA scaffold modification
  misc_feature (8)..(8): BNA scaffold modification
  misc_feature (12)..(12): BNA scaffold modification
  misc_feature (15)..(16): BNA scaffold modification
ccuccuuccaugactc

SEQ ID NO: 5709 - RNA, 16 nt, Artificial Sequence
  Antisense oligonucleotide
  misc_feature (1)..(1): BNA scaffold modification
  misc_feature (16)..(16): BNA scaffold modification
cuccuuccaugacuca

SEQ ID NO: 5710 - RNA, 16 nt, Artificial Sequence
  Antisense oligonucleotide
  misc_feature (1)..(1): BNA scaffold modification
  misc_feature (15)..(16): BNA scaffold modification
cuccuuccaugacuca

SEQ ID NO: 5711 - RNA, 16 nt, Artificial Sequence
  Antisense oligonucleotide
  misc_feature (1)..(1): BNA scaffold modification
  misc_feature (13)..(13): BNA scaffold modification
  misc_feature (16)..(16): BNA scaffold modification
cuccuuccaugacuca

SEQ ID NO: 5712 - RNA, 16 nt, Artificial Sequence
  Antisense oligonucleotide
  misc_feature (1)..(1): BNA scaffold modification
  misc_feature (11)..(11): BNA scaffold modification
  misc_feature (16)..(16): BNA scaffold modification
cuccuuccaugacuca

SEQ ID NO: 5713 - RNA, 16 nt, Artificial Sequence
  Antisense oligonucleotide
  misc_feature (1)..(1): BNA scaffold modification
  misc_feature (8)..(8): BNA scaffold modification
  misc_feature (16)..(16): BNA scaffold modification
cuccuuccaugacuca

SEQ ID NO: 5714 - RNA, 16 nt, Artificial Sequence
  Antisense oligonucleotide
  misc_feature (1)..(1): BNA scaffold modification
  misc_feature (4)..(4): BNA scaffold modification
  misc_feature (16)..(16): BNA scaffold modification
cuccuuccaugacuca

SEQ ID NO: 5715 - RNA, 16 nt, Artificial Sequence
  Antisense oligonucleotide
  misc_feature (1)..(1): BNA scaffold modification
  misc_feature (11)..(11): BNA scaffold modification
  misc_feature (15)..(16): BNA scaffold modification
cuccuuccaugacuca

SEQ ID NO: 5716 - RNA, 16 nt, Artificial Sequence
  Antisense oligonucleotide
  misc_feature (1)..(1): BNA scaffold modification
  misc_feature (8)..(8): BNA scaffold modification
  misc_feature (13)..(13): BNA scaffold modification
  misc_feature (16)..(16): BNA scaffold modification
cuccuuccaugacuca

SEQ ID NO: 5717 - RNA, 16 nt, Artificial Sequence
  Antisense oligonucleotide
  misc_feature (1)..(1): BNA scaffold modification
  misc_feature (4)..(4): BNA scaffold modification
  misc_feature (11)..(11): BNA scaffold modification
  misc_feature (16)..(16): BNA scaffold modification
cuccuuccaugacuca

SEQ ID NO: 5718 - RNA, 16 nt, Artificial Sequence
  Antisense oligonucleotide
  misc_feature (1)..(2): BNA scaffold modification
  misc_feature (15)..(16): BNA scaffold modification
ctccuuccaugacuca

SEQ ID NO: 5719 - RNA, 16 nt, Artificial Sequence
  Antisense oligonucleotide
  misc_feature (1)..(1): BNA scaffold modification
  misc_feature (4)..(4): BNA scaffold modification
  misc_feature (11)..(11): BNA scaffold modification
  misc_feature (15)..(16): BNA scaffold modification
cuccuuccaugacuca

SEQ ID NO: 5720 - RNA, 16 nt, Artificial Sequence
  Antisense oligonucleotide
  misc_feature (1)..(1): BNA scaffold modification
  misc_feature (16)..(16): BNA scaffold modification
tccuuccaugacucaa

SEQ ID NO: 5721 - RNA, 16 nt, Artificial Sequence
  Antisense oligonucleotide
  misc_feature (1)..(1): BNA scaffold modification
  misc_feature (14)..(14): BNA scaffold modification
  misc_feature (16)..(16): BNA scaffold modification
tccuuccaugacucaa

SEQ ID NO: 5722 - RNA, 16 nt, Artificial Sequence
  Antisense oligonucleotide
  misc_feature (1)..(1): BNA scaffold modification
  misc_feature (12)..(12): BNA scaffold modification
  misc_feature (16)..(16): BNA scaffold modification
tccuuccaugacucaa

SEQ ID NO: 5723 - RNA, 16 nt, Artificial Sequence
  Antisense oligonucleotide
  misc_feature (1)..(1): BNA scaffold modification
  misc_feature (10)..(10): BNA scaffold modification
  misc_feature (16)..(16): BNA scaffold modification
tccuuccaugacucaa

SEQ ID NO: 5724 - RNA, 16 nt, Artificial Sequence
  Antisense oligonucleotide
  misc_feature (1)..(1): BNA scaffold modification
  misc_feature (7)..(7): BNA scaffold modification
  misc_feature (16)..(16): BNA scaffold modification
tccuuccaugacucaa

SEQ ID NO: 5725 - RNA, 16 nt, Artificial Sequence
  Antisense oligonucleotide
  misc_feature (1)..(1): BNA scaffold modification
  misc_feature (3)..(3): BNA scaffold modification
  misc_feature (16)..(16): BNA scaffold modification
tccuuccaugacucaa

SEQ ID NO: 5726 - RNA, 16 nt, Artificial Sequence
  Antisense oligonucleotide
  misc_feature (1)..(1): BNA scaffold modification
  misc_feature (10)..(10): BNA scaffold modification
  misc_feature (14)..(14): BNA scaffold modification
  misc_feature (16)..(16): BNA scaffold modification
tccuuccaugacucaa

SEQ ID NO: 5727 - RNA, 16 nt, Artificial Sequence
  Antisense oligonucleotide
  misc_feature (1)..(1): BNA scaffold modification
  misc_feature (7)..(7): BNA scaffold modification
  misc_feature (12)..(12): BNA scaffold modification
  misc_feature (16)..(16): BNA scaffold modification
tccuuccaugacucaa

SEQ ID NO: 5728 - RNA, 16 nt, Artificial Sequence
  Antisense oligonucleotide
  misc_feature (1)..(1): BNA scaffold modification
  misc_feature (3)..(3): BNA scaffold modification
  misc_feature (10)..(10): BNA scaffold modification
  misc_feature (16)..(16): BNA scaffold modification
tccuuccaugacucaa

SEQ ID NO: 5729 - RNA, 16 nt, Artificial Sequence
  Antisense oligonucleotide
  misc_feature (1)..(2): BNA scaffold modification
  misc_feature (14)..(16): BNA scaffold modification
tccuuccaugacucaa

SEQ ID NO: 5730 - RNA, 16 nt, Artificial Sequence
  Antisense oligonucleotide
  misc_feature (1)..(1): BNA scaffold modification
  misc_feature (10)..(10): BNA scaffold modification
  misc_feature (14)..(16): BNA scaffold modification
tccuuccaugacucaa

SEQ ID NO: 5731 - RNA, 16 nt, Artificial Sequence
  Antisense oligonucleotide
  misc_feature (1)..(1): BNA scaffold modification
  misc_feature (16)..(16): BNA scaffold modification
ccuuccaugacucaag

SEQ ID NO: 5732 - RNA, 16 nt, Artificial Sequence
  Antisense oligonucleotide
  misc_feature (1)..(1): BNA scaffold modification
  misc_feature (13)..(13): BNA scaffold modification
  misc_feature (16)..(16): BNA scaffold modification
ccuuccaugacucaag

SEQ ID NO: 5733 - RNA, 16 nt, Artificial Sequence
  Antisense oligonucleotide
  misc_feature (1)..(1): BNA scaffold modification
  misc_feature (11)..(11): BNA scaffold modification
  misc_feature (16)..(16): BNA scaffold modification
ccuuccaugacucaag

SEQ ID NO: 5734 - RNA, 16 nt, Artificial Sequence
  Antisense oligonucleotide
  misc_feature (1)..(1): BNA scaffold modification
  misc_feature (9)..(9): BNA scaffold modification
  misc_feature (16)..(16): BNA scaffold modification
ccuuccaugacucaag

SEQ ID NO: 5735 - RNA, 16 nt, Artificial Sequence
  Antisense oligonucleotide
  misc_feature (1)..(1): BNA scaffold modification
  misc_feature (6)..(6): BNA scaffold modification
  misc_feature (16)..(16): BNA scaffold modification
ccuuccaugacucaag

SEQ ID NO: 5736 - RNA, 16 nt, Artificial Sequence
  Antisense oligonucleotide
  misc_feature (1)..(2): BNA scaffold modification
  misc_feature (16)..(16): BNA scaffold modification
ccuuccaugacucaag

SEQ ID NO: 5737 - RNA, 16 nt, Artificial Sequence
  Antisense oligonucleotide
  misc_feature (1)..(1): BNA scaffold modification
  misc_feature (9)..(9): BNA scaffold modification
  misc_feature (13)..(13): BNA scaffold modification
  misc_feature (16)..(16): BNA scaffold modification
ccuuccaugacucaag

SEQ ID NO: 5738 - RNA, 16 nt, Artificial Sequence
  Antisense oligonucleotide
  misc_feature (1)..(1): BNA scaffold modification
  misc_feature (6)..(6): BNA scaffold modification
  misc_feature (11)..(11): BNA scaffold modification
  misc_feature (16)..(16): BNA scaffold modification
ccuuccaugacucaag

SEQ ID NO: 5739 - RNA, 16 nt, Artificial Sequence
  Antisense oligonucleotide
  misc_feature (1)..(2): BNA scaffold modification
  misc_feature (9)..(9): BNA scaffold modification
  misc_feature (16)..(16): BNA scaffold modification
ccuuccaugacucaag

SEQ ID NO: 5740 - RNA, 16 nt, Artificial Sequence
  Antisense oligonucleotide
  misc_feature (1)..(2): BNA scaffold modification
  misc_feature (15)..(16): BNA scaffold modification
ccuuccaugacucaag

SEQ ID NO: 5741 - RNA, 16 nt, Artificial Sequence
  Antisense oligonucleotide
  misc_feature (1)..(1): BNA scaffold modification
  misc_feature (5)..(5): BNA scaffold modification
  misc_feature (9)..(9): BNA scaffold modification
  misc_feature (15)..(16): BNA scaffold modification
ccuuccaugacucaag

SEQ ID NO: 5742 - RNA, 16 nt, Artificial Sequence
  Antisense oligonucleotide
  misc_feature (1)..(1): BNA scaffold modification
  misc_feature (16)..(16): BNA scaffold modification
cuuccaugacucaagc

SEQ ID NO: 5743 - RNA, 16 nt, Artificial Sequence
  Antisense oligonucleotide
  misc_feature (1)..(1): BNA scaffold modification
  misc_feature (15)..(16): BNA scaffold modification
cuuccaugacucaagc

SEQ ID NO: 5744 - RNA, 16 nt, Artificial Sequence
  Antisense oligonucleotide
  misc_feature (1)..(1): BNA scaffold modification
  misc_feature (12)..(12): BNA scaffold modification
  misc_feature (16)..(16): BNA scaffold modification
cuuccaugacucaagc

SEQ ID NO: 5745 - RNA, 16 nt, Artificial Sequence
  Antisense oligonucleotide
  misc_feature (1)..(1): BNA scaffold modification
  misc_feature (10)..(10): BNA scaffold modification
  misc_feature (16)..(16): BNA scaffold modification
cuuccaugacucaagc

SEQ ID NO: 5746 - RNA, 16 nt, Artificial Sequence
  Antisense oligonucleotide
  misc_feature (1)..(1): BNA scaffold modification
  misc_feature (8)..(8): BNA scaffold modification
  misc_feature (16)..(16): BNA scaffold modification
cuuccaugacucaagc

SEQ ID NO: 5747 - RNA, 16 nt, Artificial Sequence
  Antisense oligonucleotide
  misc_feature (1)..(1): BNA scaffold modification
  misc_feature (5)..(5): BNA scaffold modification
  misc_feature (16)..(16): BNA scaffold modification
cuuccaugacucaagc

SEQ ID NO: 5748 - RNA, 16 nt, Artificial Sequence
  Antisense oligonucleotide
  misc_feature (1)..(1): BNA scaffold modification
  misc_feature (8)..(8): BNA scaffold modification
  misc_feature (15)..(16): BNA scaffold modification
cuuccaugacucaagc

SEQ ID NO: 5749 - RNA, 16 nt, Artificial Sequence
  Antisense oligonucleotide
  misc_feature (1)..(1): BNA scaffold modification
  misc_feature (5)..(5): BNA scaffold modification
  misc_feature (12)..(12): BNA scaffold modification
  misc_feature (16)..(16): BNA scaffold modification
cuuccaugacucaagc

SEQ ID NO: 5750 - RNA, 16 nt, Artificial Sequence
  Antisense oligonucleotide
  misc_feature (1)..(2): BNA scaffold modification
  misc_feature (8)..(8): BNA scaffold modification
  misc_feature (10)..(10): BNA scaffold modification
  misc_feature (16)..(16): BNA scaffold modification
ctuccaugacucaagc

SEQ ID NO: 5751 - RNA, 16 nt, Artificial Sequence
  Antisense oligonucleotide
  misc_feature (1)..(2): BNA scaffold modification
  misc_feature (8)..(8): BNA scaffold modification
  misc_feature (15)..(16): BNA scaffold modification
ctuccaugacucaagc

SEQ ID NO: 5752 - RNA, 16 nt, Artificial Sequence
  Antisense oligonucleotide
  misc_feature (1)..(1): BNA scaffold modification
  misc_feature (8)..(8): BNA scaffold modification
  misc_feature (10)..(10): BNA scaffold modification
  misc_feature (15)..(16): BNA scaffold modification
cuuccaugacucaagc

SEQ ID NO: 5753 - RNA, 16 nt, Artificial Sequence
  Antisense oligonucleotide
  misc_feature (1)..(1): BNA scaffold modification
  misc_feature (16)..(16): BNA scaffold modification
tuccaugacucaagct

SEQ ID NO: 5754 - RNA, 16 nt, Artificial Sequence
  Antisense oligonucleotide
  misc_feature (1)..(1): BNA scaffold modification
  misc_feature (15)..(16): BNA scaffold modification
tuccaugacucaagct

SEQ ID NO: 5755 - RNA, 16 nt, Artificial Sequence
  Antisense oligonucleotide
  misc_feature (1)..(1): BNA scaffold modification
  misc_feature (14)..(14): BNA scaffold modification
  misc_feature (16)..(16): BNA scaffold modification
tuccaugacucaagct

SEQ ID NO: 5756 - RNA, 16 nt, Artificial Sequence
  Antisense oligonucleotide
  misc_feature (1)..(1): BNA scaffold modification
  misc_feature (11)..(11): BNA scaffold modification
  misc_feature (16)..(16): BNA scaffold modification
tuccaugacucaagct

SEQ ID NO: 5757 - RNA, 16 nt, Artificial Sequence
  Antisense oligonucleotide
  misc_feature (1)..(1): BNA scaffold modification
  misc_feature (9)..(9): BNA scaffold modification
  misc_feature (16)..(16): BNA scaffold modification
tuccaugacucaagct

SEQ ID NO: 5758 - RNA, 16 nt, Artificial Sequence
  Antisense oligonucleotide
  misc_feature (1)..(1): BNA scaffold modification
  misc_feature (7)..(7): BNA scaffold modification
  misc_feature (16)..(16): BNA scaffold modification
tuccaugacucaagct

SEQ ID NO: 5759 - RNA, 16 nt, Artificial Sequence
  Antisense oligonucleotide
  misc_feature (1)..(1): BNA scaffold modification
  misc_feature (4)..(4): BNA scaffold modification
  misc_feature (16)..(16): BNA scaffold modification
tuccaugacucaagct

SEQ ID NO: 5760 - RNA, 16 nt, Artificial Sequence
  Antisense oligonucleotide
  misc_feature (1)..(1): BNA scaffold modification
  misc_feature (9)..(9): BNA scaffold modification
  misc_feature (15)..(16): BNA scaffold modification
tuccaugacucaagct

SEQ ID NO: 5761 - RNA, 16 nt, Artificial Sequence
  Antisense oligonucleotide
  misc_feature (1)..(1): BNA scaffold modification
  misc_feature (7)..(7): BNA scaffold modification
  misc_feature (14)..(14): BNA scaffold modification
  misc_feature (16)..(16): BNA scaffold modification
tuccaugacucaagct

SEQ ID NO: 5762 - RNA, 16 nt, Artificial Sequence
  Antisense oligonucleotide
  misc_feature (1)..(1): BNA scaffold modification
  misc_feature (7)..(7): BNA scaffold modification
  misc_feature (15)..(16): BNA scaffold modification
tuccaugacucaagct

SEQ ID NO: 5763 - RNA, 16 nt, Artificial Sequence
  Antisense oligonucleotide
  misc_feature (1)..(2): BNA scaffold modification
  misc_feature (15)..(16): BNA scaffold modification
ttccaugacucaagct

SEQ ID NO: 5764 - RNA, 16 nt, Artificial Sequence
  Antisense oligonucleotide
  misc_feature (1)..(2): BNA scaffold modification
  misc_feature (7)..(7): BNA scaffold modification
  misc_feature (14)..(16): BNA scaffold modification
tuccaugacucaagct

SEQ ID NO: 5765 - RNA, 24 nt, Artificial Sequence
  Antisense oligonucleotide
  misc_feature (1)..(1): BNA scaffold modification
  misc_feature (24)..(24): BNA scaffold modification
cauucaacuguugccuccgguuct

SEQ ID NO: 5766 - RNA, 24 nt, Artificial Sequence
  Antisense oligonucleotide
  misc_feature (1)..(1): BNA scaffold modification
  misc_feature (23)..(24): BNA scaffold modification
cauucaacuguugccuccgguuct

SEQ ID NO: 5767 - RNA, 24 nt, Artificial Sequence
  Antisense oligonucleotide
  misc_feature (1)..(1): BNA scaffold modification
  misc_feature (20)..(20): BNA scaffold modification
  misc_feature (24)..(24): BNA scaffold modification
cauucaacuguugccuccgguuct

SEQ ID NO: 5768 - RNA, 24 nt, Artificial Sequence
  Antisense oligonucleotide
  misc_feature (1)..(1): BNA scaffold modification
  misc_feature (15)..(15): BNA scaffold modification
  misc_feature (24)..(24): BNA scaffold modification
cauucaacuguugccuccgguuct

SEQ ID NO: 5769 - RNA, 24 nt, Artificial Sequence
  Antisense oligonucleotide
  misc_feature (1)..(1): BNA scaffold modification
  misc_feature (10)..(10): BNA scaffold modification
  misc_feature (24)..(24): BNA scaffold modification
cauucaacuguugccuccgguuct

SEQ ID NO: 5770 - RNA, 24 nt, Artificial Sequence
  Antisense oligonucleotide
  misc_feature (1)..(1): BNA scaffold modification
  misc_feature (8)..(8): BNA scaffold modification
  misc_feature (24)..(24): BNA scaffold modification
cauucaacuguugccuccgguuct

SEQ ID NO: 5771 - RNA, 24 nt, Artificial Sequence
  Antisense oligonucleotide
  misc_feature (1)..(1): BNA scaffold modification
  misc_feature (5)..(5): BNA scaffold modification
  misc_feature (24)..(24): BNA scaffold modification
cauucaacuguugccuccgguuct

SEQ ID NO: 5772 - RNA, 24 nt, Artificial Sequence
  Antisense oligonucleotide
  misc_feature (1)..(1): BNA scaffold modification
  misc_feature (5)..(5): BNA scaffold modification
  misc_feature (10)..(10): BNA scaffold modification
  misc_feature (24)..(24): BNA scaffold modification
cauucaacuguugccuccgguuct

SEQ ID NO: 5773 - RNA, 24 nt, Artificial Sequence
  Antisense oligonucleotide
  misc_feature (1)..(1): BNA scaffold modification
  misc_feature (10)..(10): BNA scaffold modification
  misc_feature (23)..(24): BNA scaffold modification
cauucaacuguugccuccgguuct

SEQ ID NO: 5774 - RNA, 24 nt, Artificial Sequence
  Antisense oligonucleotide
  misc_feature (1)..(1): BNA scaffold modification
  misc_feature (5)..(5): BNA scaffold modification
  misc_feature (10)..(10): BNA scaffold modification
  misc_feature (23)..(24): BNA scaffold modification
cauucaacuguugccuccgguuct

SEQ ID NO: 5775 - RNA, 24 nt, Artificial Sequence
  Antisense oligonucleotide
  misc_feature (1)..(2): BNA scaffold modification
  misc_feature (23)..(24): BNA scaffold modification
cauucaacuguugccuccgguuct

SEQ ID NO: 5776 - RNA, 24 nt, Artificial Sequence
  Antisense oligonucleotide
  misc_feature (1)..(1): BNA scaffold modification
  misc_feature (23)..(24): BNA scaffold modification
cauucaacuguugccuccgguuct

SEQ ID NO: 5777 - RNA, 24 nt, Artificial Sequence
  Antisense oligonucleotide
  misc_feature (1)..(1): BNA scaffold modification
  misc_feature (5)..(5): BNA scaffold modification
  misc_feature (8)..(8): BNA scaffold modification
  misc_feature (10)..(10): BNA scaffold modification
  misc_feature (24)..(24): BNA scaffold modification
cauucaacuguugccuccgguuct

SEQ ID NO: 5778 - RNA, 24 nt, Artificial Sequence
  Antisense oligonucleotide
  misc_feature (1)..(1): BNA scaffold modification
  misc_feature (10)..(10): BNA scaffold modification
  misc_feature (15)..(15): BNA scaffold modification
  misc_feature (20)..(20): BNA scaffold modification
  misc_feature (23)..(24): BNA scaffold modification
cauucaacuguugccuccgguuct

SEQ ID NO: 5779 - RNA, 22 nt, Artificial Sequence
  Antisense oligonucleotide
  misc_feature (1)..(1): BNA scaffold modification
  misc_feature (22)..(22): BNA scaffold modification
cauucaacuguugccuccggut

SEQ ID NO: 5780 - RNA, 22 nt, Artificial Sequence
  Antisense oligonucleotide
  misc_feature (1)..(1): BNA scaffold modification
  misc_feature (20)..(20): BNA scaffold modification
  misc_feature (22)..(22): BNA scaffold modification
cauucaacuguugccuccggut

SEQ ID NO: 5781 - RNA, 22 nt, Artificial Sequence
  Antisense oligonucleotide
  misc_feature (1)..(1): BNA scaffold modification
  misc_feature (15)..(15): BNA scaffold modification
  misc_feature (22)..(22): BNA scaffold modification
cauucaacuguugccuccggut

SEQ ID NO: 5782 - RNA, 22 nt, Artificial Sequence
  Antisense oligonucleotide
  misc_feature (1)..(1): BNA scaffold modification
  misc_feature (10)..(10): BNA scaffold modification
  misc_feature (22)..(22): BNA scaffold modification
cauucaacuguugccuccggut

SEQ ID NO: 5783 - RNA, 22 nt, Artificial Sequence
  Antisense oligonucleotide
  misc_feature (1)..(1): BNA scaffold modification
  misc_feature (8)..(8): BNA scaffold modification
  misc_feature (22)..(22): BNA scaffold modification
cauucaacuguugccuccggut

SEQ ID NO: 5784 - RNA, 22 nt, Artificial Sequence
  Antisense oligonucleotide
  misc_feature (1)..(1): BNA scaffold modification
  misc_feature (5)..(5): BNA scaffold modification
  misc_feature (22)..(22): BNA scaffold modification
cauucaacuguugccuccggut

SEQ ID NO: 5785 - RNA, 22 nt, Artificial Sequence
  Antisense oligonucleotide
  misc_feature (1)..(1): BNA scaffold modification
  misc_feature (10)..(10): BNA scaffold modification
  misc_feature (20)..(20): BNA scaffold modification
  misc_feature (22)..(22): BNA scaffold modification
cauucaacuguugccuccggut

SEQ ID NO: 5786 - RNA, 22 nt, Artificial Sequence
  Antisense oligonucleotide
  misc_feature (1)..(1): BNA scaffold modification
  misc_feature (5)..(5): BNA scaffold modification
  misc_feature (10)..(10): BNA scaffold modification
  misc_feature (22)..(22): BNA scaffold modification
cauucaacuguugccuccggut

SEQ ID NO: 5787 - RNA, 22 nt, Artificial Sequence
  Antisense oligonucleotide
  misc_feature (1)..(1): BNA scaffold modification
  misc_feature (8)..(8): BNA scaffold modification
  misc_feature (17)..(17): BNA scaffold modification
  misc_feature (22)..(22): BNA scaffold modification
cauucaacuguugccuccggut

SEQ ID NO: 5788 - RNA, 22 nt, Artificial Sequence
  Antisense oligonucleotide
  misc_feature (1)..(1): BNA scaffold modification
  misc_feature (21)..(22): BNA scaffold modification
cauucaacuguugccuccggtt

SEQ ID NO: 5789 - RNA, 22 nt, Artificial Sequence
  Antisense oligonucleotide
  misc_feature (1)..(2): BNA scaffold modification
  misc_feature (21)..(22): BNA scaffold modification
cauucaacuguugccuccggtt

SEQ ID NO: 5790 - RNA, 22 nt, Artificial Sequence
  Antisense oligonucleotide
  misc_feature (1)..(1): BNA scaffold modification
  misc_feature (8)..(8): BNA scaffold modification
  misc_feature (10)..(10): BNA scaffold modification
  misc_feature (21)..(22): BNA scaffold modification
cauucaacuguugccuccggtt

SEQ ID NO: 5791 - RNA, 22 nt, Artificial Sequence
  Antisense oligonucleotide
  misc_feature (1)..(1): BNA scaffold modification
  misc_feature (5)..(5): BNA scaffold modification
  misc_feature (8)..(8): BNA scaffold modification
  misc_feature (10)..(10): BNA scaffold modification
  misc_feature (21)..(22): BNA scaffold modification
cauucaacuguugccuccggtt

SEQ ID NO: 5792 - RNA, 22 nt, Artificial Sequence
  Antisense oligonucleotide
  misc_feature (1)..(1): BNA scaffold modification
  misc_feature (22)..(22): BNA scaffold modification
auucaacuguugccuccgguuc

SEQ ID NO: 5793 - RNA, 22 nt, Artificial Sequence
  Antisense oligonucleotide
  misc_feature (1)..(1): BNA scaffold modification
  misc_feature (19)..(19): BNA scaffold modification
  misc_feature (22)..(22): BNA scaffold modification
auucaacuguugccuccgguuc

SEQ ID NO: 5794 - RNA, 22 nt, Artificial Sequence
  Antisense oligonucleotide
  misc_feature (1)..(1): BNA scaffold modification
  misc_feature (14)..(14): BNA scaffold modification
  misc_feature (22)..(22): BNA scaffold modification
auucaacuguugccuccgguuc

SEQ ID NO: 5795 - RNA, 22 nt, Artificial Sequence
  Antisense oligonucleotide
  misc_feature (1)..(1): BNA scaffold modification
  misc_feature (9)..(9): BNA scaffold modification
  misc_feature (22)..(22): BNA scaffold modification
auucaacuguugccuccgguuc

SEQ ID NO: 5796 - RNA, 22 nt, Artificial Sequence
  Antisense oligonucleotide
  misc_feature (1)..(1): BNA scaffold modification
  misc_feature (7)..(7): BNA scaffold modification
  misc_feature (22)..(22): BNA scaffold modification
auucaacuguugccuccgguuc

SEQ ID NO: 5797 - RNA, 22 nt, Artificial Sequence
  Antisense oligonucleotide
  misc_feature (1)..(1): BNA scaffold modification
  misc_feature (4)..(4): BNA scaffold modification
  misc_feature (22)..(22): BNA scaffold modification
auucaacuguugccuccgguuc

SEQ ID NO: 5798 - RNA, 22 nt, Artificial Sequence
  Antisense oligonucleotide
  misc_feature (1)..(2): BNA scaffold modification
  misc_feature (4)..(4): BNA scaffold modification
  misc_feature (22)..(22): BNA scaffold modification
atucaacuguugccuccgguuc

SEQ ID NO: 5799 - RNA, 22 nt, Artificial Sequence
  Antisense oligonucleotide
  misc_feature (1)..(1): BNA scaffold modification
  misc_feature (4)..(4): BNA scaffold modification
  misc_feature (7)..(7): BNA scaffold modification
  misc_feature (22)..(22): BNA scaffold modification
auucaacuguugccuccgguuc

SEQ ID NO: 5800 - RNA, 22 nt, Artificial Sequence
  Antisense oligonucleotide
  misc_feature (1)..(1): BNA scaffold modification
  misc_feature (7)..(7): BNA scaffold modification
  misc_feature (9)..(9): BNA scaffold modification
  misc_feature (22)..(22): BNA scaffold modification
auucaacuguugccuccgguuc

SEQ ID NO: 5801 - RNA, 22 nt, Artificial Sequence
  Antisense oligonucleotide
  misc_feature (1)..(1): BNA scaffold modification
  misc_feature (4)..(4): BNA scaffold modification
  misc_feature (9)..(9): BNA scaffold modification
  misc_feature (22)..(22): BNA scaffold modification
auucaacuguugccuccgguuc

SEQ ID NO: 5802 - RNA, 22 nt, Artificial Sequence
  Antisense oligonucleotide
  misc_feature (1)..(1): BNA scaffold modification
  misc_feature (9)..(9): BNA scaffold modification
  misc_feature (21)..(22): BNA scaffold modification
auucaacuguugccuccggutc

SEQ ID NO: 5803 - RNA, 22 nt, Artificial Sequence
  Antisense oligonucleotide
  misc_feature (1)..(1): BNA scaffold modification
  misc_feature (12)..(12): BNA scaffold modification
  misc_feature (19)..(19): BNA scaffold modification
  misc_feature (22)..(22): BNA scaffold modification
auucaacuguugccuccgguuc

SEQ ID NO: 5804 - RNA, 22 nt, Artificial Sequence
  Antisense oligonucleotide
  misc_feature (1)..(2): BNA scaffold modification
  misc_feature (21)..(22): BNA scaffold modification
atucaacuguugccuccggutc

SEQ ID NO: 5805 - RNA, 22 nt, Artificial Sequence
  Antisense oligonucleotide
  misc_feature (1)..(1): BNA scaffold modification
  misc_feature (4)..(4): BNA scaffold modification
  misc_feature (9)..(9): BNA scaffold modification
  misc_feature (21)..(22): BNA scaffold modification
auucaacuguugccuccggutc

SEQ ID NO: 5806 - RNA, 22 nt, Artificial Sequence
  Antisense oligonucleotide
  misc_feature (1)..(1): BNA scaffold modification
  misc_feature (22)..(22): BNA scaffold modification
tucaacuguugccuccgguuct

SEQ ID NO: 5807 - RNA, 22 nt, Artificial Sequence
  Antisense oligonucleotide
  misc_feature (1)..(1): BNA scaffold modification
  misc_feature (18)..(18): BNA scaffold modification
  misc_feature (22)..(22): BNA scaffold modification
tucaacuguugccuccgguuct

SEQ ID NO: 5808 - RNA, 22 nt, Artificial Sequence
  Antisense oligonucleotide
  misc_feature (1)..(1): BNA scaffold modification
  misc_feature (13)..(13): BNA scaffold modification
  misc_feature (22)..(22): BNA scaffold modification
tucaacuguugccuccgguuct

SEQ ID NO: 5809 - RNA, 22 nt, Artificial Sequence
  Antisense oligonucleotide
  misc_feature (1)..(1): BNA scaffold modification
  misc_feature (8)..(8): BNA scaffold modification
  misc_feature (22)..(22): BNA scaffold modification
tucaacuguugccuccgguuct

SEQ ID NO: 5810 - RNA, 22 nt, Artificial Sequence
  Antisense oligonucleotide
  misc_feature (1)..(1): BNA scaffold modification
  misc_feature (6)..(6): BNA scaffold modification
  misc_feature (22)..(22): BNA scaffold modification
tucaacuguugccuccgguuct

SEQ ID NO: 5811 - RNA, 22 nt, Artificial Sequence
  Antisense oligonucleotide
  misc_feature (1)..(1): BNA scaffold modification
  misc_feature (3)..(3): BNA scaffold modification
  misc_feature (22)..(22): BNA scaffold modification
tucaacuguugccuccgguuct

SEQ ID NO: 5812 - RNA, 22 nt, Artificial Sequence
  Antisense oligonucleotide
  misc_feature (1)..(1): BNA scaffold modification
  misc_feature (3)..(3): BNA scaffold modification
  misc_feature (8)..(8): BNA scaffold modification
  misc_feature (22)..(22): BNA scaffold modification
tucaacuguugccuccgguuct

SEQ ID NO: 5813 - RNA, 22 nt, Artificial Sequence
  Antisense oligonucleotide
  misc_feature (1)..(1): BNA scaffold modification
  misc_feature (6)..(6): BNA scaffold modification
  misc_feature (13)..(13): BNA scaffold modification
  misc_feature (22)..(22): BNA scaffold modification
tucaacuguugccuccgguuct

SEQ ID NO: 5814 - RNA, 22 nt, Artificial Sequence
  Antisense oligonucleotide
  misc_feature (1)..(1): BNA scaffold modification
  misc_feature (8)..(8): BNA scaffold modification
  misc_feature (21)..(22): BNA scaffold modification
tucaacuguugccuccgguuct

SEQ ID NO: 5815 - RNA, 22 nt, Artificial Sequence
  Antisense oligonucleotide
  misc_feature (1)..(1): BNA scaffold modification
  misc_feature (3)..(3): BNA scaffold modification
  misc_feature (8)..(8): BNA scaffold modification
  misc_feature (21)..(22): BNA scaffold modification
tucaacuguugccuccgguuct

SEQ ID NO: 5816 - RNA, 22 nt, Artificial Sequence
  Antisense oligonucleotide
  misc_feature (1)..(2): BNA scaffold modification
  misc_feature (21)..(22): BNA scaffold modification
ttcaacuguugccuccgguuct

SEQ ID NO: 5817 - RNA, 22 nt, Artificial Sequence
  Antisense oligonucleotide
  misc_feature (1)..(1): BNA scaffold modification
  misc_feature (6)..(6): BNA scaffold modification
  misc_feature (21)..(22): BNA scaffold modification
tucaacuguugccuccgguuct

SEQ ID NO: 5818 - RNA, 22 nt, Artificial Sequence
  Antisense oligonucleotide
  misc_feature (1)..(1): BNA scaffold modification
  misc_feature (8)..(8): BNA scaffold modification
  misc_feature (11)..(11): BNA scaffold modification
  misc_feature (21)..(22): BNA scaffold modification
tucaacuguugccuccgguuct

SEQ ID NO: 5819 - RNA, 20 nt, Artificial Sequence
  Antisense oligonucleotide
  misc_feature (1)..(1): BNA scaffold modification
  misc_feature (20)..(20): BNA scaffold modification
cauucaacuguugccuccgg

SEQ ID NO: 5820 - RNA, 20 nt, Artificial Sequence
  Antisense oligonucleotide
  misc_feature (1)..(1): BNA scaffold modification
  misc_feature (15)..(15): BNA scaffold modification
  misc_feature (20)..(20): BNA scaffold modification
cauucaacuguugccuccgg

SEQ ID NO: 5821 - RNA, 20 nt, Artificial Sequence
  Antisense oligonucleotide
  misc_feature (1)..(1): BNA scaffold modification
  misc_feature (10)..(10): BNA scaffold modification
  misc_feature (20)..(20): BNA scaffold modification
cauucaacuguugccuccgg

SEQ ID NO: 5822 - RNA, 20 nt, Artificial Sequence
  Antisense oligonucleotide
  misc_feature (1)..(1): BNA scaffold modification
  misc_feature (8)..(8): BNA scaffold modification
  misc_feature (20)..(20): BNA scaffold modification
cauucaacuguugccuccgg

SEQ ID NO: 5823 - RNA, 20 nt, Artificial Sequence
  Antisense oligonucleotide
  misc_feature (1)..(1): BNA scaffold modification
  misc_feature (5)..(5): BNA scaffold modification
  misc_feature (20)..(20): BNA scaffold modification
cauucaacuguugccuccgg

SEQ ID NO: 5824 - RNA, 20 nt, Artificial Sequence
  Antisense oligonucleotide
  misc_feature (1)..(1): BNA scaffold modification
  misc_feature (5)..(5): BNA scaffold modification
  misc_feature (10)..(10): BNA scaffold modification
  misc_feature (20)..(20): BNA scaffold modification
cauucaacuguugccuccgg

SEQ ID NO: 5825 - RNA, 20 nt, Artificial Sequence
  Antisense oligonucleotide
  misc_feature (1)..(1): BNA scaffold modification
  misc_feature (8)..(8): BNA scaffold modification
  misc_feature (13)..(13): BNA scaffold modification
  misc_feature (20)..(20): BNA scaffold modification
cauucaacuguugccuccgg

SEQ ID NO: 5826 - RNA, 20 nt, Artificial Sequence
  Antisense oligonucleotide
  misc_feature (1)..(1): BNA scaffold modification
  misc_feature (10)..(10): BNA scaffold modification
  misc_feature (13)..(13): BNA scaffold modification
  misc_feature (20)..(20): BNA scaffold modification
cauucaacuguugccuccgg

SEQ ID NO: 5827 - RNA, 20 nt, Artificial Sequence
  Antisense oligonucleotide
  misc_feature (1)..(1): BNA scaffold modification
  misc_feature (19)..(20): BNA scaffold modification
cauucaacuguugccuccgg

SEQ ID NO: 5828 - RNA, 20 nt, Artificial Sequence
  Antisense oligonucleotide
  misc_feature (1)..(2): BNA scaffold modification
  misc_feature (19)..(20): BNA scaffold modification
cauucaacuguugccuccgg

SEQ ID NO: 5829 - RNA, 20 nt, Artificial Sequence
  Antisense oligonucleotide
  misc_feature (1)..(2): BNA scaffold modification
  misc_feature (8)..(8): BNA scaffold modification
  misc_feature (10)..(10): BNA scaffold modification
  misc_feature (20)..(20): BNA scaffold modification
cauucaacuguugccuccgg

SEQ ID NO: 5830 - RNA, 20 nt, Artificial Sequence
  Antisense oligonucleotide
  misc_feature (1)..(1): BNA scaffold modification
  misc_feature (20)..(20): BNA scaffold modification
auucaacuguugccuccggt

SEQ ID NO: 5831 - RNA, 20 nt, Artificial Sequence
  Antisense oligonucleotide
  misc_feature (1)..(1): BNA scaffold modification
  misc_feature (4)..(4): BNA scaffold modification
  misc_feature (20)..(20): BNA scaffold modification
auucaacuguugccuccggt

SEQ ID NO: 5832 - RNA, 20 nt, Artificial Sequence
  Antisense oligonucleotide
  misc_feature (1)..(1): BNA scaffold modification
  misc_feature (7)..(7): BNA scaffold modification
  misc_feature (20)..(20): BNA scaffold modification
auucaacuguugccuccggt

SEQ ID NO: 5833 - RNA, 20 nt, Artificial Sequence
  Antisense oligonucleotide
  misc_feature (1)..(1): BNA scaffold modification
  misc_feature (9)..(9): BNA scaffold modification
  misc_feature (20)..(20): BNA scaffold modification
auucaacuguugccuccggt

SEQ ID NO: 5834 - RNA, 20 nt, Artificial Sequence
  Antisense oligonucleotide
  misc_feature (1)..(1): BNA scaffold modification
  misc_feature (12)..(12): BNA scaffold modification
  misc_feature (20)..(20): BNA scaffold modification
auucaacuguugccuccggt

SEQ ID NO: 5835 - RNA, 20 nt, Artificial Sequence
  Antisense oligonucleotide
  misc_feature (1)..(1): BNA scaffold modification
  misc_feature (7)..(7): BNA scaffold modification
  misc_feature (12)..(12): BNA scaffold modification
  misc_feature (20)..(20): BNA scaffold modification
auucaacuguugccuccggt

SEQ ID NO: 5836 - RNA, 20 nt, Artificial Sequence
  Antisense oligonucleotide
  misc_feature (1)..(1): BNA scaffold modification
  misc_feature (4)..(4): BNA scaffold modification
  misc_feature (9)..(9): BNA scaffold modification
  misc_feature (20)..(20): BNA scaffold modification
auucaacuguugccuccggt

SEQ ID NO: 5837 - RNA, 20 nt, Artificial Sequence
  Antisense oligonucleotide
  misc_feature (1)..(1): BNA scaffold modification
  misc_feature (4)..(4): BNA scaffold modification
  misc_feature (9)..(9): BNA scaffold modification
  misc_feature (12)..(12): BNA scaffold modification
  misc_feature (20)..(20): BNA scaffold modification
auucaacuguugccuccggt

SEQ ID NO: 5838 - RNA, 20 nt, Artificial Sequence
  Antisense oligonucleotide
  misc_feature (1)..(1): BNA scaffold modification
  misc_feature (19)..(20): BNA scaffold modification
auucaacuguugccuccggt

SEQ ID NO: 5839 - RNA, 20 nt, Artificial Sequence
  Antisense oligonucleotide
  misc_feature (1)..(2): BNA scaffold modification
  misc_feature (19)..(20): BNA scaffold modification
atucaacuguugccuccggt

SEQ ID NO: 5840 - RNA, 20 nt, Artificial Sequence
  Antisense oligonucleotide
  misc_feature (1)..(2): BNA scaffold modification
  misc_feature (9)..(9): BNA scaffold modification
  misc_feature (19)..(20): BNA scaffold modification
atucaacuguugccuccggt

SEQ ID NO: 5841 - RNA, 20 nt, Artificial Sequence
  Antisense oligonucleotide
  misc_feature (1)..(1): BNA scaffold modification
  misc_feature (20)..(20): BNA scaffold modification
tucaacuguugccuccggut

SEQ ID NO: 5842 - RNA, 20 nt, Artificial Sequence
  Antisense oligonucleotide
  misc_feature (1)..(1): BNA scaffold modification
  misc_feature (3)..(3): BNA scaffold modification
  misc_feature (20)..(20): BNA scaffold modification
tucaacuguugccuccggut

SEQ ID NO: 5843 - RNA, 20 nt, Artificial Sequence
  Antisense oligonucleotide
  misc_feature (1)..(1): BNA scaffold modification
  misc_feature (6)..(6): BNA scaffold modification
  misc_feature (20)..(20): BNA scaffold modification
tucaacuguugccuccggut

SEQ ID NO: 5844 - RNA, 20 nt, Artificial Sequence
  Antisense oligonucleotide
  misc_feature (1)..(1): BNA scaffold modification
  misc_feature (8)..(8): BNA scaffold modification
  misc_feature (20)..(20): BNA scaffold modification
tucaacuguugccuccggut

SEQ ID NO: 5845 - RNA, 20 nt, Artificial Sequence
  Antisense oligonucleotide
  misc_feature (1)..(1): BNA scaffold modification
  misc_feature (11)..(11): BNA scaffold modification
  misc_feature (20)..(20): BNA scaffold modification
tucaacuguugccuccggut

SEQ ID NO: 5846 - RNA, 20 nt, Artificial Sequence
  Antisense oligonucleotide
  misc_feature (1)..(1): BNA scaffold modification
  misc_feature (18)..(18): BNA scaffold modification
  misc_feature (20)..(20): BNA scaffold modification
tucaacuguugccuccggut

SEQ ID NO: 5847 - RNA, 20 nt, Artificial Sequence
  Antisense oligonucleotide
  misc_feature (1)..(1): BNA scaffold modification
  misc_feature (3)..(3): BNA scaffold modification
  misc_feature (8)..(8): BNA scaffold modification
  misc_feature (20)..(20): BNA scaffold modification
tucaacuguugccuccggut

SEQ ID NO: 5848 - RNA, 20 nt, Artificial Sequence
  Antisense oligonucleotide
  misc_feature (1)..(1): BNA scaffold modification
  misc_feature (6)..(6): BNA scaffold modification
  misc_feature (11)..(11): BNA scaffold modification
  misc_feature (20)..(20): BNA scaffold modification
tucaacuguugccuccggut

SEQ ID NO: 5849 - RNA, 20 nt, Artificial Sequence
  Antisense oligonucleotide
  misc_feature (1)..(1): BNA scaffold modification
  misc_feature (19)..(20): BNA scaffold modification
tucaacuguugccuccggtt

SEQ ID NO: 5850 - RNA, 20 nt, Artificial Sequence
  Antisense oligonucleotide
  misc_feature (1)..(2): BNA scaffold modification
  misc_feature (19)..(20): BNA scaffold modification
ttcaacuguugccuccggtt

SEQ ID NO: 5851 - RNA, 20 nt, Artificial Sequence
  Antisense oligonucleotide
  misc_feature (1)..(2): BNA scaffold modification
  misc_feature (8)..(8): BNA scaffold modification
  misc_feature (19)..(20): BNA scaffold modification
ttcaacuguugccuccggtt

SEQ ID NO: 5852 - RNA, 20 nt, Artificial Sequence
  Antisense oligonucleotide
  misc_feature (1)..(1): BNA scaffold modification
  misc_feature (3)..(3): BNA scaffold modification
  misc_feature (8)..(8): BNA scaffold modification
  misc_feature (19)..(20): BNA scaffold modification
tucaacuguugccuccggtt

SEQ ID NO: 5853 - RNA, 20 nt, Artificial Sequence
  Antisense oligonucleotide
  misc_feature (1)..(1): BNA scaffold modification
  misc_feature (17)..(17): BNA scaffold modification
  misc_feature (20)..(20): BNA scaffold modification
tucaacuguugccuccggut

SEQ ID NO: 5854 - RNA, 20 nt, Artificial Sequence
  Antisense oligonucleotide
  misc_feature (1)..(1): BNA scaffold modification
  misc_feature (12)..(12): BNA scaffold modification
  misc_feature (20)..(20): BNA scaffold modification
tucaacuguugccuccggut

SEQ ID NO: 5855 - RNA, 20 nt, Artificial Sequence
  Antisense oligonucleotide
  misc_feature (1)..(1): BNA scaffold modification
  misc_feature (20)..(20): BNA scaffold modification
tcaacuguugccuccgguuc

SEQ ID NO: 5856 - RNA, 20 nt, Artificial Sequence
  Antisense oligonucleotide
  misc_feature (1)..(2): BNA scaffold modification
  misc_feature (20)..(20): BNA scaffold modification
tcaacuguugccuccgguuc

SEQ ID NO: 5857 - RNA, 20 nt, Artificial Sequence
  Antisense oligonucleotide
  misc_feature (1)..(1): BNA scaffold modification
  misc_feature (5)..(5): BNA scaffold modification
  misc_feature (20)..(20): BNA scaffold modification
tcaacuguugccuccgguuc

SEQ ID NO: 5858 - RNA, 20 nt, Artificial Sequence
  Antisense oligonucleotide
  misc_feature (1)..(1): BNA scaffold modification
  misc_feature (7)..(7): BNA scaffold modification
  misc_feature (20)..(20): BNA scaffold modification
tcaacuguugccuccgguuc

SEQ ID NO: 5859 - RNA, 20 nt, Artificial Sequence
  Antisense oligonucleotide
  misc_feature (1)..(1): BNA scaffold modification
  misc_feature (10)..(10): BNA scaffold modification
  misc_feature (20)..(20): BNA scaffold modification
tcaacuguugccuccgguuc

SEQ ID NO: 5860 - RNA, 20 nt, Artificial Sequence
  Antisense oligonucleotide
  misc_feature (1)..(1): BNA scaffold modification
  misc_feature (14)..(14): BNA scaffold modification
  misc_feature (20)..(20): BNA scaffold modification
tcaacuguugccuccgguuc

SEQ ID NO: 5861 - RNA, 20 nt, Artificial Sequence
  Antisense oligonucleotide
  misc_feature (1)..(1): BNA scaffold modification
  misc_feature (17)..(17): BNA scaffold modification
  misc_feature (20)..(20): BNA scaffold modification
tcaacuguugccuccgguuc

SEQ ID NO: 5862 - RNA, 20 nt, Artificial Sequence
  Antisense oligonucleotide
  misc_feature (1)..(1): BNA scaffold modification
  misc_feature (19)..(20): BNA scaffold modification
tcaacuguugccuccggutc

SEQ ID NO: 5863 - RNA, 20 nt, Artificial Sequence
  Antisense oligonucleotide
  misc_feature (1)..(2): BNA scaffold modification
  misc_feature (7)..(7): BNA scaffold modification
  misc_feature (20)..(20): BNA scaffold modification
tcaacuguugccuccgguuc

SEQ ID NO: 5864 - RNA, 20 nt, Artificial Sequence
  Antisense oligonucleotide
  misc_feature (1)..(1): BNA scaffold modification
  misc_feature (6)..(6): BNA scaffold modification
  misc_feature (10)..(10): BNA scaffold modification
  misc_feature (20)..(20): BNA scaffold modification
tcaacuguugccuccgguuc

SEQ ID NO: 5865 - RNA, 20 nt, Artificial Sequence
  Antisense oligonucleotide
  misc_feature (1)..(1): BNA scaffold modification
  misc_feature (5)..(5): BNA scaffold modification
  misc_feature (10)..(10): BNA scaffold modification
  misc_feature (20)..(20): BNA scaffold modification
tcaacuguugccuccgguuc

SEQ ID NO: 5866 - RNA, 20 nt, Artificial Sequence
  Antisense oligonucleotide
  misc_feature (1)..(1): BNA scaffold modification
  misc_feature (7)..(7): BNA scaffold modification
  misc_feature (17)..(17): BNA scaffold modification
  misc_feature (20)..(20): BNA scaffold modification
tcaacuguugccuccgguuc

SEQ ID NO: 5867 - RNA, 20 nt, Artificial Sequence
  Antisense oligonucleotide
  misc_feature (1)..(2): BNA scaffold modification
  misc_feature (7)..(7): BNA scaffold modification
  misc_feature (19)..(20): BNA scaffold modification
tcaacuguugccuccggutc

SEQ ID NO: 5868 - RNA, 20 nt, Artificial Sequence
  Antisense oligonucleotide
  misc_feature (1)..(2): BNA scaffold modification
  misc_feature (5)..(5): BNA scaffold modification
  misc_feature (19)..(20): BNA scaffold modification
tcaacuguugccuccggutc

SEQ ID NO: 5869 - RNA, 20 nt, Artificial Sequence
  Antisense oligonucleotide
  misc_feature (1)..(1): BNA scaffold modification
  misc_feature (20)..(20): BNA scaffold modification
caacuguugccuccgguuct

SEQ ID NO: 5870 - RNA, 20 nt, Artificial Sequence
  Antisense oligonucleotide
  misc_feature (1)..(1): BNA scaffold modification
  misc_feature (4)..(4): BNA scaffold modification
  misc_feature (20)..(20): BNA scaffold modification
caacuguugccuccgguuct

SEQ ID NO: 5871 - RNA, 20 nt, Artificial Sequence
  Antisense oligonucleotide
  misc_feature (1)..(1): BNA scaffold modification
  misc_feature (6)..(6): BNA scaffold modification
  misc_feature (20)..(20): BNA scaffold modification
caacuguugccuccgguuct

SEQ ID NO: 5872 - RNA, 20 nt, Artificial Sequence
  Antisense oligonucleotide
  misc_feature (1)..(1): BNA scaffold modification
  misc_feature (9)..(9): BNA scaffold modification
  misc_feature (20)..(20): BNA scaffold modification
caacuguugccuccgguuct

SEQ ID NO: 5873 - RNA, 20 nt, Artificial Sequence
  Antisense oligonucleotide
  misc_feature (1)..(1): BNA scaffold modification
  misc_feature (13)..(13): BNA scaffold modification
  misc_feature (20)..(20): BNA scaffold modification
caacuguugccuccgguuct

SEQ ID NO: 5874 - RNA, 20 nt, Artificial Sequence
  Antisense oligonucleotide
  misc_feature (1)..(1): BNA scaffold modification
  misc_feature (16)..(16): BNA scaffold modification
  misc_feature (20)..(20): BNA scaffold modification
caacuguugccuccgguuct

SEQ ID NO: 5875 - RNA, 20 nt, Artificial Sequence
  Antisense oligonucleotide
  misc_feature (1)..(1): BNA scaffold modification
  misc_feature (19)..(20): BNA scaffold modification
caacuguugccuccgguuct

SEQ ID NO: 5876 - RNA, 20 nt, Artificial Sequence
  Antisense oligonucleotide
  misc_feature (1)..(1): BNA scaffold modification
  misc_feature (4)..(4): BNA scaffold modification
  misc_feature (9)..(9): BNA scaffold modification
  misc_feature (20)..(20): BNA scaffold modification
caacuguugccuccgguuct

SEQ ID NO: 5877 - RNA, 20 nt, Artificial Sequence
  Antisense oligonucleotide
  misc_feature (1)..(1): BNA scaffold modification
  misc_feature (6)..(6): BNA scaffold modification
  misc_feature (19)..(20): BNA scaffold modification
caacuguugccuccgguuct

SEQ ID NO: 5878 - RNA, 20 nt, Artificial Sequence
  Antisense oligonucleotide
  misc_feature (1)..(2): BNA scaffold modification
  misc_feature (19)..(20): BNA scaffold modification
caacuguugccuccgguuct

SEQ ID NO: 5879 - RNA, 20 nt, Artificial Sequence
  Antisense oligonucleotide
  misc_feature (1)..(1): BNA scaffold modification
  misc_feature (4)..(4): BNA scaffold modification
  misc_feature (19)..(20): BNA scaffold modification
caacuguugccuccgguuct

SEQ ID NO: 5880 - RNA, 18 nt, Artificial Sequence
  Antisense oligonucleotide
  misc_feature (1)..(1): BNA scaffold modification
  misc_feature (18)..(18): BNA scaffold modification
cauucaacuguugccucc

SEQ ID NO: 5881 - RNA, 18 nt, Artificial Sequence
  Antisense oligonucleotide
  misc_feature (1)..(1): BNA scaffold modification
  misc_feature (5)..(5): BNA scaffold modification
  misc_feature (18)..(18): BNA scaffold modification
cauucaacuguugccucc

SEQ ID NO: 5882 - RNA, 18 nt, Artificial Sequence
  Antisense oligonucleotide
  misc_feature (1)..(1): BNA scaffold modification
  misc_feature (8)..(8): BNA scaffold modification
  misc_feature (18)..(18): BNA scaffold modification
cauucaacuguugccucc

SEQ ID NO: 5883 - RNA, 18 nt, Artificial Sequence
  Antisense oligonucleotide
  misc_feature (1)..(1): BNA scaffold modification
  misc_feature (10)..(10): BNA scaffold modification
  misc_feature (18)..(18): BNA scaffold modification
cauucaacuguugccucc

SEQ ID NO: 5884 - RNA, 18 nt, Artificial Sequence
  Antisense oligonucleotide
  misc_feature (1)..(1): BNA scaffold modification
  misc_feature (5)..(5): BNA scaffold modification
  misc_feature (10)..(10): BNA scaffold modification
  misc_feature (18)..(18): BNA scaffold modification
cauucaacuguugccucc

SEQ ID NO: 5885 - RNA, 18 nt, Artificial Sequence
  Antisense oligonucleotide
  misc_feature (1)..(1): BNA scaffold modification
  misc_feature (8)..(8): BNA scaffold modification
  misc_feature (13)..(13): BNA scaffold modification
  misc_feature (18)..(18): BNA scaffold modification
cauucaacuguugccucc

SEQ ID NO: 5886 - RNA, 18 nt, Artificial Sequence
  Antisense oligonucleotide
  misc_feature (1)..(1): BNA scaffold modification
  misc_feature (17)..(18): BNA scaffold modification
cauucaacuguugccucc

SEQ ID NO: 5887 - RNA, 18 nt, Artificial Sequence
  Antisense oligonucleotide
  misc_feature (1)..(1): BNA scaffold modification
  misc_feature (10)..(10): BNA scaffold modification
  misc_feature (17)..(18): BNA scaffold modification
cauucaacuguugccucc

SEQ ID NO: 5888 - RNA, 18 nt, Artificial Sequence
  Antisense oligonucleotide
  misc_feature (1)..(1): BNA scaffold modification
  misc_feature (8)..(8): BNA scaffold modification
  misc_feature (17)..(18): BNA scaffold modification
cauucaacuguugccucc

SEQ ID NO: 5889 - RNA, 18 nt, Artificial Sequence
  Antisense oligonucleotide
  misc_feature (1)..(1): BNA scaffold modification
  misc_feature (5)..(5): BNA scaffold modification
  misc_feature (17)..(18): BNA scaffold modification
cauucaacuguugccucc

SEQ ID NO: 5890 - RNA, 18 nt, Artificial Sequence
  Antisense oligonucleotide
  misc_feature (1)..(2): BNA scaffold modification
  misc_feature (17)..(18): BNA scaffold modification
cauucaacuguugccucc

SEQ ID NO: 5891 - RNA, 18 nt, Artificial Sequence
  Antisense oligonucleotide
  misc_feature (1)..(1): BNA scaffold modification
  misc_feature (18)..(18): BNA scaffold modification
auucaacuguugccuccg

SEQ ID NO: 5892 - RNA, 18 nt, Artificial Sequence
  Antisense oligonucleotide
  misc_feature (1)..(1): BNA scaffold modification
  misc_feature (4)..(4): BNA scaffold modification
  misc_feature (18)..(18): BNA scaffold modification
auucaacuguugccuccg

SEQ ID NO: 5893 - RNA, 18 nt, Artificial Sequence
  Antisense oligonucleotide
  misc_feature (1)..(1): BNA scaffold modification
  misc_feature (7)..(7): BNA scaffold modification
  misc_feature (18)..(18): BNA scaffold modification
auucaacuguugccuccg

SEQ ID NO: 5894 - RNA, 18 nt, Artificial Sequence
  Antisense oligonucleotide
  misc_feature (1)..(1): BNA scaffold modification
  misc_feature (9)..(9): BNA scaffold modification
  misc_feature (18)..(18): BNA scaffold modification
auucaacuguugccuccg

SEQ ID NO: 5895 - RNA, 18 nt, Artificial Sequence
  Antisense oligonucleotide
  misc_feature (1)..(1): BNA scaffold modification
  misc_feature (12)..(12): BNA scaffold modification
  misc_feature (18)..(18): BNA scaffold modification
auucaacuguugccuccg

SEQ ID NO: 5896 - RNA, 18 nt, Artificial Sequence
  Antisense oligonucleotide
  misc_feature (1)..(1): BNA scaffold modification
  misc_feature (17)..(18): BNA scaffold modification
auucaacuguugccuccg

SEQ ID NO: 5897 - RNA, 18 nt, Artificial Sequence
  Antisense oligonucleotide
  misc_feature (1)..(1): BNA scaffold modification
  misc_feature (4)..(4): BNA scaffold modification
  misc_feature (9)..(9): BNA scaffold modification
  misc_feature (18)..(18): BNA scaffold modification
auucaacuguugccuccg

SEQ ID NO: 5898 - RNA, 18 nt, Artificial Sequence
  Antisense oligonucleotide
  misc_feature (1)..(1): BNA scaffold modification
  misc_feature (7)..(7): BNA scaffold modification
  misc_feature (12)..(12): BNA scaffold modification
  misc_feature (18)..(18): BNA scaffold modification
auucaacuguugccuccg

SEQ ID NO: 5899 - RNA, 18 nt, Artificial Sequence
  Antisense oligonucleotide
  misc_feature (1)..(1): BNA scaffold modification
  misc_feature (4)..(4): BNA scaffold modification
  misc_feature (7)..(7): BNA scaffold modification
  misc_feature (9)..(9): BNA scaffold modification
  misc_feature (18)..(18): BNA scaffold modification
auucaacuguugccuccg

SEQ ID NO: 5900 - RNA, 18 nt, Artificial Sequence
  Antisense oligonucleotide
  misc_feature (1)..(2): BNA scaffold modification
  misc_feature (9)..(9): BNA scaffold modification
  misc_feature (18)..(18): BNA scaffold modification
atucaacuguugccuccg

SEQ ID NO: 5901 - RNA, 18 nt, Artificial Sequence
  Antisense oligonucleotide
  misc_feature (1)..(1): BNA scaffold modification
  misc_feature (7)..(7): BNA scaffold modification
  misc_feature (18)..(18): BNA scaffold modification
atucaacuguugccuccg

SEQ ID NO: 5902 - RNA, 18 nt, Artificial Sequence
  Antisense oligonucleotide
  misc_feature (1)..(1): BNA scaffold modification
  misc_feature (18)..(18): BNA scaffold modification
tucaacuguugccuccgg

SEQ ID NO: 5903 - RNA, 18 nt, Artificial Sequence
  Antisense oligonucleotide
  misc_feature (1)..(1): BNA scaffold modification
  misc_feature (3)..(3): BNA scaffold modification
  misc_feature (18)..(18): BNA scaffold modification
tucaacuguugccuccgg

SEQ ID NO: 5904 - RNA, 18 nt, Artificial Sequence
  Antisense oligonucleotide
  misc_feature (1)..(1): BNA scaffold modification
  misc_feature (6)..(6): BNA scaffold modification
  misc_feature (18)..(18): BNA scaffold modification
tucaacuguugccuccgg

SEQ ID NO: 5905 - RNA, 18 nt, Artificial Sequence
  Antisense oligonucleotide
  misc_feature (1)..(1): BNA scaffold modification
  misc_feature (8)..(8): BNA scaffold modification
  misc_feature (18)..(18): BNA scaffold modification
tucaacuguugccuccgg

SEQ ID NO: 5906 - RNA, 18 nt, Artificial Sequence
  Antisense oligonucleotide
  misc_feature (1)..(1): BNA scaffold modification
  misc_feature (3)..(3): BNA scaffold modification
  misc_feature (8)..(8): BNA scaffold modification
  misc_feature (18)..(18): BNA scaffold modification
tucaacuguugccuccgg

SEQ ID NO: 5907 - RNA, 18 nt, Artificial Sequence
  Antisense oligonucleotide
  misc_feature (1)..(1): BNA scaffold modification
  misc_feature (17)..(18): BNA scaffold modification
tucaacuguugccuccgg

SEQ ID NO: 5908 - RNA, 18 nt, Artificial Sequence
  Antisense oligonucleotide
  misc_feature (1)..(2): BNA scaffold modification
  misc_feature (17)..(18): BNA scaffold modification
ttcaacuguugccuccgg

SEQ ID NO: 5909 - RNA, 18 nt, Artificial Sequence
  Antisense oligonucleotide
  misc_feature (1)..(1): BNA scaffold modification
  misc_feature (3)..(3): BNA scaffold modification
  misc_feature (8)..(8): BNA scaffold modification
  misc_feature (18)..(18): BNA scaffold modification
tucaacuguugccuccgg

SEQ ID NO: 5910 - RNA, 18 nt, Artificial Sequence
  Antisense oligonucleotide
  misc_feature (1)..(1): BNA scaffold modification
  misc_feature (6)..(6): BNA scaffold modification
  misc_feature (8)..(8): BNA scaffold modification
  misc_feature (18)..(18): BNA scaffold modification
tucaacuguugccuccgg

SEQ ID NO: 5911 - RNA, 18 nt, Artificial Sequence
  Antisense oligonucleotide
  misc_feature (1)..(2): BNA scaffold modification
  misc_feature (17)..(18): BNA scaffold modification
ttcaacuguugccuccgg

SEQ ID NO: 5912 - RNA, 18 nt, Artificial Sequence
  Antisense oligonucleotide
  misc_feature (1)..(1): BNA scaffold modification
  misc_feature (3)..(3): BNA scaffold modification
  misc_feature (6)..(6): BNA scaffold modification
  misc_feature (8)..(8): BNA scaffold modification
  misc_feature (18)..(18): BNA scaffold modification
tucaacuguugccuccgg

SEQ ID NO: 5913 - RNA, 18 nt, Artificial Sequence
  Antisense oligonucleotide
  misc_feature (1)..(1): BNA scaffold modification
  misc_feature (18)..(18): BNA scaffold modification
tcaacuguugccuccggt

SEQ ID NO: 5914 - RNA, 18 nt, Artificial Sequence
  Antisense oligonucleotide
  misc_feature (1)..(2): BNA scaffold modification
  misc_feature (18)..(18): BNA scaffold modification
tcaacuguugccuccggt

SEQ ID NO: 5915 - RNA, 18 nt, Artificial Sequence
  Antisense oligonucleotide
  misc_feature (1)..(1): BNA scaffold modification
  misc_feature (5)..(5): BNA scaffold modification
  misc_feature (18)..(18): BNA scaffold modification
tcaacuguugccuccggt

SEQ ID NO: 5916 - RNA, 18 nt, Artificial Sequence
  Antisense oligonucleotide
  misc_feature (1)..(1): BNA scaffold modification
  misc_feature (7)..(7): BNA scaffold modification
  misc_feature (18)..(18): BNA scaffold modification
tcaacuguugccuccggt

SEQ ID NO: 5917 - RNA, 18 nt, Artificial Sequence
  Antisense oligonucleotide
  misc_feature (1)..(1): BNA scaffold modification
  misc_feature (10)..(10): BNA scaffold modification
  misc_feature (18)..(18): BNA scaffold modification
tcaacuguugccuccggt

SEQ ID NO: 5918 - RNA, 18 nt, Artificial Sequence
  Antisense oligonucleotide
  misc_feature (1)..(2): BNA scaffold modification
  misc_feature (7)..(7): BNA scaffold modification
  misc_feature (18)..(18): BNA scaffold modification
tcaacuguugccuccggt

SEQ ID NO: 5919 - RNA, 18 nt, Artificial Sequence
  Antisense oligonucleotide
  misc_feature (1)..(1): BNA scaffold modification
  misc_feature (5)..(5): BNA scaffold modification
  misc_feature (10)..(10): BNA scaffold modification
  misc_feature (18)..(18): BNA scaffold modification
tcaacuguugccuccggt

SEQ ID NO: 5920 - RNA, 18 nt, Artificial Sequence
  Antisense oligonucleotide
  misc_feature (1)..(1): BNA scaffold modification
  misc_feature (17)..(18): BNA scaffold modification
tcaacuguugccuccggt

SEQ ID NO: 5921 - RNA, 18 nt, Artificial Sequence
  Antisense oligonucleotide
  misc_feature (1)..(2): BNA scaffold modification
  misc_feature (17)..(18): BNA scaffold modification
tcaacuguugccuccggt

SEQ ID NO: 5922 - RNA, 18 nt, Artificial Sequence
  Antisense oligonucleotide
  misc_feature (1)..(1): BNA scaffold modification
  misc_feature (7)..(7): BNA scaffold modification
  misc_feature (17)..(18): BNA scaffold modification
tcaacuguugccuccggt

SEQ ID NO: 5923 - RNA, 18 nt, Artificial Sequence
  Antisense oligonucleotide
  misc_feature (1)..(2): BNA scaffold modification
  misc_feature (5)..(5): BNA scaffold modification
  misc_feature (7)..(7): BNA scaffold modification
  misc_feature (18)..(18): BNA scaffold modification
tcaacuguugccuccggt

SEQ ID NO: 5924 - RNA, 18 nt, Artificial Sequence
  Antisense oligonucleotide
  misc_feature (1)..(1): BNA scaffold modification
  misc_feature (18)..(18): BNA scaffold modification
caacuguugccuccggut

SEQ ID NO: 5925 - RNA, 18 nt, Artificial Sequence
  Antisense oligonucleotide
  misc_feature (1)..(1): BNA scaffold modification
  misc_feature (4)..(4): BNA scaffold modification
  misc_feature (18)..(18): BNA scaffold modification
caacuguugccuccggut

SEQ ID NO: 5926 - RNA, 18 nt, Artificial Sequence
  Antisense oligonucleotide
  misc_feature (1)..(1): BNA scaffold modification
  misc_feature (6)..(6): BNA scaffold modification
  misc_feature (18)..(18): BNA scaffold modification
caacuguugccuccggut

SEQ ID NO: 5927 - RNA, 18 nt, Artificial Sequence
  Antisense oligonucleotide
  misc_feature (1)..(1): BNA scaffold modification
  misc_feature (9)..(9): BNA scaffold modification
  misc_feature (18)..(18): BNA scaffold modification
caacuguugccuccggut

SEQ ID NO: 5928 - RNA, 18 nt, Artificial Sequence
  Antisense oligonucleotide
  misc_feature (1)..(1): BNA scaffold modification
  misc_feature (13)..(13): BNA scaffold modification
  misc_feature (18)..(18): BNA scaffold modification
caacuguugccuccggut

SEQ ID NO: 5929 - RNA, 18 nt, Artificial Sequence
  Antisense oligonucleotide
  misc_feature (1)..(1): BNA scaffold modification
  misc_feature (4)..(4): BNA scaffold modification
  misc_feature (6)..(6): BNA scaffold modification
  misc_feature (18)..(18): BNA scaffold modification
caacuguugccuccggut

SEQ ID NO: 5930 - RNA, 18 nt, Artificial Sequence
  Antisense oligonucleotide
  misc_feature (1)..(1): BNA scaffold modification
  misc_feature (17)..(18): BNA scaffold modification
caacuguugccuccggtt

SEQ ID NO: 5931 - RNA, 18 nt, Artificial Sequence
  Antisense oligonucleotide
  misc_feature (1)..(2): BNA scaffold modification
  misc_feature (17)..(18): BNA scaffold modification
caacuguugccuccggtt

SEQ ID NO: 5932 - RNA, 18 nt, Artificial Sequence
  Antisense oligonucleotide
  misc_feature (1)..(1): BNA scaffold modification
  misc_feature (6)..(6): BNA scaffold modification
  misc_feature (17)..(18): BNA scaffold modification
caacuguugccuccggtt

SEQ ID NO: 5933 - RNA, 18 nt, Artificial Sequence
  Antisense oligonucleotide
  misc_feature (1)..(1): BNA scaffold modification
  misc_feature (4)..(4): BNA scaffold modification
  misc_feature (6)..(6): BNA scaffold modification
  misc_feature (17)..(18): BNA scaffold modification
caacuguugccuccggtt

SEQ ID NO: 5934 - RNA, 18 nt, Artificial Sequence
  Antisense oligonucleotide
  misc_feature (1)..(1): BNA scaffold modification
  misc_feature (18)..(18): BNA scaffold modification
aacuguugccuccgguuc

SEQ ID NO: 5935 - RNA, 18 nt, Artificial Sequence
  Antisense oligonucleotide
  misc_feature (1)..(1): BNA scaffold modification
  misc_feature (3)..(3): BNA scaffold modification
  misc_feature (18)..(18): BNA scaffold modification
aacuguugccuccgguuc

SEQ ID NO: 5936 - RNA, 18 nt, Artificial Sequence
  Antisense oligonucleotide
  misc_feature (1)..(1): BNA scaffold modification
  misc_feature (5)..(5): BNA scaffold modification
  misc_feature (18)..(18): BNA scaffold modification
aacuguugccuccgguuc

SEQ ID NO: 5937 - RNA, 18 nt, Artificial Sequence
  Antisense oligonucleotide
  misc_feature (1)..(1): BNA scaffold modification
  misc_feature (8)..(8): BNA scaffold modification
  misc_feature (18)..(18): BNA scaffold modification
aacuguugccuccgguuc

SEQ ID NO: 5938 - RNA, 18 nt, Artificial Sequence
  Antisense oligonucleotide
  misc_feature (1)..(1): BNA scaffold modification
  misc_feature (12)..(12): BNA scaffold modification
  misc_feature (18)..(18): BNA scaffold modification
aacuguugccuccgguuc

SEQ ID NO: 5939 - RNA, 18 nt, Artificial Sequence
  Antisense oligonucleotide
  misc_feature (1)..(1): BNA scaffold modification
  misc_feature (3)..(3): BNA scaffold modification
  misc_feature (8)..(8): BNA scaffold modification
  misc_feature (18)..(18): BNA scaffold modification
aacuguugccuccgguuc

SEQ ID NO: 5940 - RNA, 18 nt, Artificial Sequence
  Antisense oligonucleotide
  misc_feature (1)..(1): BNA scaffold modification
  misc_feature (3)..(3): BNA scaffold modification
  misc_feature (5)..(5): BNA scaffold modification
  misc_feature (18)..(18): BNA scaffold modification
aacuguugccuccgguuc

SEQ ID NO: 5941 - RNA, 18 nt, Artificial Sequence
  Antisense oligonucleotide
  misc_feature (1)..(1): BNA scaffold modification
  misc_feature (3)..(3): BNA scaffold modification
  misc_feature (15)..(15): BNA scaffold modification
  misc_feature (18)..(18): BNA scaffold modification
aacuguugccuccgguuc

SEQ ID NO: 5942 - RNA, 18 nt, Artificial Sequence
  Antisense oligonucleotide
  misc_feature (1)..(1): BNA scaffold modification
  misc_feature (17)..(18): BNA scaffold modification
aacuguugccuccggutc

SEQ ID NO: 5943 - RNA, 18 nt, Artificial Sequence
  Antisense oligonucleotide
  misc_feature (1)..(2): BNA scaffold modification
  misc_feature (17)..(18): BNA scaffold modification
aacuguugccuccggutc

SEQ ID NO: 5944 - RNA, 18 nt, Artificial Sequence
  Antisense oligonucleotide
  misc_feature (1)..(3): BNA scaffold modification
  misc_feature (17)..(18): BNA scaffold modification
aacuguugccuccggutc

SEQ ID NO: 5945 - RNA, 18 nt, Artificial Sequence
  Antisense oligonucleotide
  misc_feature (1)..(1): BNA scaffold modification
  misc_feature (18)..(18): BNA scaffold modification
acuguugccuccgguuct

SEQ ID NO: 5946 - RNA, 18 nt, Artificial Sequence
  Antisense oligonucleotide
  misc_feature (1)..(2): BNA scaffold modification
  misc_feature (18)..(18): BNA scaffold modification
acuguugccuccgguuct

SEQ ID NO: 5947 - RNA, 18 nt, Artificial Sequence
  Antisense oligonucleotide
  misc_feature (1)..(1): BNA scaffold modification
  misc_feature (4)..(4): BNA scaffold modification
  misc_feature (7)..(7): BNA scaffold modification
  misc_feature (18)..(18): BNA scaffold modification
acuguugccuccgguuct

SEQ ID NO: 5948 - RNA, 18 nt, Artificial Sequence
  Antisense oligonucleotide
  misc_feature (1)..(1): BNA scaffold modification
  misc_feature (11)..(11): BNA scaffold modification
  misc_feature (18)..(18): BNA scaffold modification
acuguugccuccgguuct

SEQ ID NO: 5949 - RNA, 18 nt, Artificial Sequence
  Antisense oligonucleotide
  misc_feature (1)..(1): BNA scaffold modification
  misc_feature (17)..(18): BNA scaffold modification
acuguugccuccgguuct

SEQ ID NO: 5950 - RNA, 18 nt, Artificial Sequence
  Antisense oligonucleotide
  misc_feature (1)..(1): BNA scaffold modification
  misc_feature (4)..(4): BNA scaffold modification
  misc_feature (17)..(18): BNA scaffold modification
acuguugccuccgguuct

SEQ ID NO: 5951 - RNA, 18 nt, Artificial Sequence
  Antisense oligonucleotide
  misc_feature (1)..(2): BNA scaffold modification
  misc_feature (4)..(4): BNA scaffold modification
  misc_feature (17)..(18): BNA scaffold modification
acuguugccuccgguuct

SEQ ID NO: 5952 - RNA, 18 nt, Artificial Sequence
  Antisense oligonucleotide
  misc_feature (1)..(2): BNA scaffold modification
  misc_feature (4)..(4): BNA scaffold modification
  misc_feature (18)..(18): BNA scaffold modification
acuguugccuccgguuct

SEQ ID NO: 5953 - RNA, 18 nt, Artificial Sequence
  Antisense oligonucleotide
  misc_feature (1)..(2): BNA scaffold modification
  misc_feature (4)..(4): BNA scaffold modification
  misc_feature (9)..(9): BNA scaffold modification
  misc_feature (17)..(18): BNA scaffold modification
acuguugccuccgguuct

SEQ ID NO: 5954 - RNA, 16 nt, Artificial Sequence
  Antisense oligonucleotide
  misc_feature (1)..(1): BNA scaffold modification
  misc_feature (16)..(16): BNA scaffold modification
cauucaacuguugcct

SEQ ID NO: 5955 - RNA, 16 nt, Artificial Sequence
  Antisense oligonucleotide
  misc_feature (1)..(1): BNA scaffold modification
  misc_feature (5)..(5): BNA scaffold modification
  misc_feature (16)..(16): BNA scaffold modification
cauucaacuguugcct

SEQ ID NO: 5956 - RNA, 16 nt, Artificial Sequence
  Antisense oligonucleotide
  misc_feature (1)..(1): BNA scaffold modification
  misc_feature (8)..(8): BNA scaffold modification
  misc_feature (16)..(16): BNA scaffold modification
cauucaacuguugcct

SEQ ID NO: 5957 - RNA, 16 nt, Artificial Sequence
  Antisense oligonucleotide
  misc_feature (1)..(1): BNA scaffold modification
  misc_feature (10)..(10): BNA scaffold modification
  misc_feature (16)..(16): BNA scaffold modification
cauucaacuguugcct

SEQ ID NO: 5958 - RNA, 16 nt, Artificial Sequence
  Antisense oligonucleotide
  misc_feature (1)..(1): BNA scaffold modification
  misc_feature (13)..(13): BNA scaffold modification
  misc_feature (16)..(16): BNA scaffold modification
cauucaacuguugcct

SEQ ID NO: 5959 - RNA, 16 nt, Artificial Sequence
  Antisense oligonucleotide
  misc_feature (1)..(1): BNA scaffold modification
  misc_feature (5)..(5): BNA scaffold modification
  misc_feature (10)..(10): BNA scaffold modification
  misc_feature (16)..(16): BNA scaffold modification
cauucaacuguugcct

SEQ ID NO: 5960 - RNA, 16 nt, Artificial Sequence
  Antisense oligonucleotide
  misc_feature (1)..(1): BNA scaffold modification
  misc_feature (5)..(5): BNA scaffold modification
  misc_feature (15)..(16): BNA scaffold modification
cauucaacuguugcct

SEQ ID NO: 5961 - RNA, 16 nt, Artificial Sequence
  Antisense oligonucleotide
  misc_feature (1)..(1): BNA scaffold modification
  misc_feature (15)..(16): BNA scaffold modification
cauucaacuguugcct

SEQ ID NO: 5962 - RNA, 16 nt, Artificial Sequence
  Antisense oligonucleotide
  misc_feature (1)..(2): BNA scaffold modification
  misc_feature (15)..(16): BNA scaffold modification
cauucaacuguugcct

SEQ ID NO: 5963 - RNA, 16 nt, Artificial Sequence
  Antisense oligonucleotide
  misc_feature (1)..(1): BNA scaffold modification
  misc_feature (5)..(5): BNA scaffold modification
  misc_feature (8)..(8): BNA scaffold modification
  misc_feature (15)..(16): BNA scaffold modification
cauucaacuguugcct

SEQ ID NO: 5964 - RNA, 16 nt, Artificial Sequence
  Antisense oligonucleotide
  misc_feature (1)..(1): BNA scaffold modification
  misc_feature (8)..(8): BNA scaffold modification
  misc_feature (10)..(10): BNA scaffold modification
  misc_feature (15)..(16): BNA scaffold modification
cauucaacuguugcct

SEQ ID NO: 5965 - RNA, 16 nt, Artificial Sequence
  Antisense oligonucleotide
  misc_feature (1)..(1): BNA scaffold modification
  misc_feature (16)..(16): BNA scaffold modification
auucaacuguugccuc

SEQ ID NO: 5966 - RNA, 16 nt, Artificial Sequence
  Antisense oligonucleotide
  misc_feature (1)..(1): BNA scaffold modification
  misc_feature (4)..(4): BNA scaffold modification
  misc_feature (16)..(16): BNA scaffold modification
auucaacuguugccuc

SEQ ID NO: 5967 - RNA, 16 nt, Artificial Sequence
  Antisense oligonucleotide
  misc_feature (1)..(1): BNA scaffold modification
  misc_feature (7)..(7): BNA scaffold modification
  misc_feature (16)..(16): BNA scaffold modification
auucaacuguugccuc

SEQ ID NO: 5968 - RNA, 16 nt, Artificial Sequence
  Antisense oligonucleotide
  misc_feature (1)..(1): BNA scaffold modification
  misc_feature (9)..(9): BNA scaffold modification
  misc_feature (16)..(16): BNA scaffold modification
auucaacuguugccuc

SEQ ID NO: 5969 - RNA, 16 nt, Artificial Sequence
  Antisense oligonucleotide
  misc_feature (1)..(1): BNA scaffold modification
  misc_feature (12)..(12): BNA scaffold modification
  misc_feature (16)..(16): BNA scaffold modification
auucaacuguugccuc

SEQ ID NO: 5970 - RNA, 16 nt, Artificial Sequence
  Antisense oligonucleotide
  misc_feature (1)..(1): BNA scaffold modification
  misc_feature (4)..(4): BNA scaffold modification
  misc_feature (9)..(9): BNA scaffold modification
  misc_feature (16)..(16): BNA scaffold modification
auucaacuguugccuc

SEQ ID NO: 5971 - RNA, 16 nt, Artificial Sequence
  Antisense oligonucleotide
  misc_feature (1)..(1): BNA scaffold modification
  misc_feature (4)..(4): BNA scaffold modification
  misc_feature (7)..(7): BNA scaffold modification
  misc_feature (16)..(16): BNA scaffold modification
auucaacuguugccuc

SEQ ID NO: 5972 - RNA, 16 nt, Artificial Sequence
  Antisense oligonucleotide
  misc_feature (1)..(1): BNA scaffold modification
  misc_feature (4)..(4): BNA scaffold modification
  misc_feature (7)..(7): BNA scaffold modification
  misc_feature (9)..(9): BNA scaffold modification
  misc_feature (16)..(16): BNA scaffold modification
auucaacuguugccuc

SEQ ID NO: 5973 - RNA, 16 nt, Artificial Sequence
  Antisense oligonucleotide
  misc_feature (1)..(2): BNA scaffold modification
  misc_feature (15)..(16): BNA scaffold modification
atucaacuguugcctc

SEQ ID NO: 5974 - RNA, 16 nt, Artificial Sequence
  Antisense oligonucleotide
  misc_feature (1)..(2): BNA scaffold modification
  misc_feature (7)..(7): BNA scaffold modification
  misc_feature (15)..(16): BNA scaffold modification
atucaacuguugcctc

SEQ ID NO: 5975 - RNA, 16 nt, Artificial Sequence
  Antisense oligonucleotide
  misc_feature (1)..(2): BNA scaffold modification
  misc_feature (9)..(9): BNA scaffold modification
  misc_feature (15)..(16): BNA scaffold modification
atucaacuguugcctc

SEQ ID NO: 5976 - RNA, 16 nt, Artificial Sequence
  Antisense oligonucleotide
  misc_feature (1)..(1): BNA scaffold modification
  misc_feature (16)..(16): BNA scaffold modification
tucaacuguugccucc

SEQ ID NO: 5977 - RNA, 16 nt, Artificial Sequence
  Antisense oligonucleotide
  misc_feature (1)..(1): BNA scaffold modification
  misc_feature (3)..(3): BNA scaffold modification
  misc_feature (16)..(16): BNA scaffold modification
tucaacuguugccucc

SEQ ID NO: 5978 - RNA, 16 nt, Artificial Sequence
  Antisense oligonucleotide
  misc_feature (1)..(1): BNA scaffold modification
  misc_feature (6)..(6): BNA scaffold modification
  misc_feature (16)..(16): BNA scaffold modification
tucaacuguugccucc

SEQ ID NO: 5979 - RNA, 16 nt, Artificial Sequence
  Antisense oligonucleotide
  misc_feature (1)..(1): BNA scaffold modification
  misc_feature (8)..(8): BNA scaffold modification
  misc_feature (16)..(16): BNA scaffold modification
tucaacuguugccucc

SEQ ID NO: 5980 - RNA, 16 nt, Artificial Sequence
  Antisense oligonucleotide
  misc_feature (1)..(1): BNA scaffold modification
  misc_feature (15)..(16): BNA scaffold modification
tucaacuguugccucc

SEQ ID NO: 5981 - RNA, 16 nt, Artificial Sequence
  Antisense oligonucleotide
  misc_feature (1)..(1): BNA scaffold modification
  misc_feature (3)..(3): BNA scaffold modification
  misc_feature (8)..(8): BNA scaffold modification
  misc_feature (16)..(16): BNA scaffold modification
tucaacuguugccucc

SEQ ID NO: 5982 - RNA, 16 nt, Artificial Sequence
  Antisense oligonucleotide
  misc_feature (1)..(1): BNA scaffold modification
  misc_feature (6)..(6): BNA scaffold modification
  misc_feature (8)..(8): BNA scaffold modification
  misc_feature (16)..(16): BNA scaffold modification
tucaacuguugccucc

SEQ ID NO: 5983 - RNA, 16 nt, Artificial Sequence
  Antisense oligonucleotide
  misc_feature (1)..(1): BNA scaffold modification
  misc_feature (3)..(3): BNA scaffold modification
  misc_feature (6)..(6): BNA scaffold modification
  misc_feature (8)..(8): BNA scaffold modification
  misc_feature (16)..(16): BNA scaffold modification
tucaacuguugccucc

SEQ ID NO: 5984 - RNA, 16 nt, Artificial Sequence
  Antisense oligonucleotide
  misc_feature (1)..(1): BNA scaffold modification
  misc_feature (15)..(16): BNA scaffold modification
tucaacuguugccucc

SEQ ID NO: 5985 - RNA, 16 nt, Artificial Sequence
  Antisense oligonucleotide
  misc_feature (1)..(2): BNA scaffold modification
  misc_feature (15)..(16): BNA scaffold modification
ttcaacuguugccucc

SEQ ID NO: 5986 - RNA, 16 nt, Artificial Sequence
  Antisense oligonucleotide
  misc_feature (1)..(2): BNA scaffold modification
  misc_feature (8)..(8): BNA scaffold modification
  misc_feature (15)..(16): BNA scaffold modification
ttcaacuguugccucc

SEQ ID NO: 5987 - RNA, 16 nt, Artificial Sequence
  Antisense oligonucleotide
  misc_feature (1)..(1): BNA scaffold modification
  misc_feature (16)..(16): BNA scaffold modification
tcaacuguugccuccg

SEQ ID NO: 5988 - RNA, 16 nt, Artificial Sequence
  Antisense oligonucleotide
  misc_feature (1)..(2): BNA scaffold modification
  misc_feature (16)..(16): BNA scaffold modification
tcaacuguugccuccg

SEQ ID NO: 5989 - RNA, 16 nt, Artificial Sequence
  Antisense oligonucleotide
  misc_feature (1)..(1): BNA scaffold modification
  misc_feature (5)..(5): BNA scaffold modification
  misc_feature (16)..(16): BNA scaffold modification
tcaacuguugccuccg

SEQ ID NO: 5990 - RNA, 16 nt, Artificial Sequence
  Antisense oligonucleotide
  misc_feature (1)..(1): BNA scaffold modification
  misc_feature (7)..(7): BNA scaffold modification
  misc_feature (16)..(16): BNA scaffold modification
tcaacuguugccuccg

SEQ ID NO: 5991 - RNA, 16 nt, Artificial Sequence
  Antisense oligonucleotide
  misc_feature (1)..(1): BNA scaffold modification
  misc_feature (10)..(10): BNA scaffold modification
  misc_feature (16)..(16): BNA scaffold modification
tcaacuguugccuccg

SEQ ID NO: 5992 - RNA, 16 nt, Artificial Sequence
  Antisense oligonucleotide
  misc_feature (1)..(1): BNA scaffold modification
  misc_feature (15)..(16): BNA scaffold modification
tcaacuguugccuccg

SEQ ID NO: 5993 - RNA, 16 nt, Artificial Sequence
  Antisense oligonucleotide
  misc_feature (1)..(1): BNA scaffold modification
  misc_feature (5)..(5): BNA scaffold modification
  misc_feature (7)..(7): BNA scaffold modification
  misc_feature (16)..(16): BNA scaffold modification
tcaacuguugccuccg

SEQ ID NO: 5994 - RNA, 16 nt, Artificial Sequence
  Antisense oligonucleotide
  misc_feature (1)..(2): BNA scaffold modification
  misc_feature (7)..(7): BNA scaffold modification
  misc_feature (16)..(16): BNA scaffold modification
tcaacuguugccuccg

SEQ ID NO: 5995 - RNA, 16 nt, Artificial Sequence
  Antisense oligonucleotide
  misc_feature (1)..(2): BNA scaffold modification
  misc_feature (15)..(16): BNA scaffold modification
tcaacuguugccuccg

SEQ ID NO: 5996 - RNA, 16 nt, Artificial Sequence
  Antisense oligonucleotide
  misc_feature (1)..(2): BNA scaffold modification
  misc_feature (7)..(7): BNA scaffold modification
  misc_feature (16)..(16): BNA scaffold modification
tcaacuguugccuccg

SEQ ID NO: 5997 - RNA, 16 nt, Artificial Sequence
  Antisense oligonucleotide
  misc_feature (1)..(2): BNA scaffold modification
  misc_feature (5)..(5): BNA scaffold modification
  misc_feature (7)..(7): BNA scaffold modification
  misc_feature (15)..(16): BNA scaffold modification
tcaacuguugccuccg

SEQ ID NO: 5998 - RNA, 16 nt, Artificial Sequence
  Antisense oligonucleotide
  misc_feature (1)..(1): BNA scaffold modification
  misc_feature (16)..(16): BNA scaffold modification
caacuguugccuccgg

SEQ ID NO: 5999 - RNA, 16 nt, Artificial Sequence
  Antisense oligonucleotide
  misc_feature (1)..(1): BNA scaffold modification
  misc_feature (4)..(4): BNA scaffold modification
  misc_feature (16)..(16): BNA scaffold modification
caacuguugccuccgg

SEQ ID NO: 6000 - RNA, 16 nt, Artificial Sequence
  Antisense oligonucleotide
  misc_feature (1)..(1): BNA scaffold modification
  misc_feature (6)..(6): BNA scaffold modification
  misc_feature (16)..(16): BNA scaffold modification
caacuguugccuccgg

SEQ ID NO: 6001 - RNA, 16 nt, Artificial Sequence
  Antisense oligonucleotide
  misc_feature (1)..(1): BNA scaffold modification
  misc_feature (9)..(9): BNA scaffold modification
  misc_feature (16)..(16): BNA scaffold modification
caacuguugccuccgg

SEQ ID NO: 6002 - RNA, 16 nt, Artificial Sequence
  Antisense oligonucleotide
  misc_feature (1)..(1): BNA scaffold modification
  misc_feature (13)..(13): BNA scaffold modification
  misc_feature (16)..(16): BNA scaffold modification
caacuguugccuccgg

SEQ ID NO: 6003 - RNA, 16 nt, Artificial Sequence
  Antisense oligonucleotide
  misc_feature (1)..(1): BNA scaffold modification
  misc_feature (15)..(16): BNA scaffold modification
caacuguugccuccgg

SEQ ID NO: 6004 - RNA, 16 nt, Artificial Sequence
  Antisense oligonucleotide
  misc_feature (1)..(1): BNA scaffold modification
  misc_feature (4)..(4): BNA scaffold modification
  misc_feature (6)..(6): BNA scaffold modification
  misc_feature (16)..(16): BNA scaffold modification
caacuguugccuccgg

SEQ ID NO: 6005 - RNA, 16 nt, Artificial Sequence
  Antisense oligonucleotide
  misc_feature (1)..(2): BNA scaffold modification
  misc_feature (4)..(4): BNA scaffold modification
  misc_feature (6)..(6): BNA scaffold modification
  misc_feature (16)..(16): BNA scaffold modification
caacuguugccuccgg

SEQ ID NO: 6006 - RNA, 16 nt, Artificial Sequence
  Antisense oligonucleotide
  misc_feature (1)..(1): BNA scaffold modification
  misc_feature (9)..(9): BNA scaffold modification
  misc_feature (13)..(13): BNA scaffold modification
  misc_feature (16)..(16): BNA scaffold modification
caacuguugccuccgg

SEQ ID NO: 6007 - RNA, 16 nt, Artificial Sequence
  Antisense oligonucleotide
  misc_feature (1)..(1): BNA scaffold modification
  misc_feature (16)..(16): BNA scaffold modification
aacuguugccuccggt

SEQ ID NO: 6008 - RNA, 16 nt, Artificial Sequence
  Antisense oligonucleotide
  misc_feature (1)..(1): BNA scaffold modification
  misc_feature (3)..(3): BNA scaffold modification
  misc_feature (16)..(16): BNA scaffold modification
aacuguugccuccggt

SEQ ID NO: 6009 - RNA, 16 nt, Artificial Sequence
  Antisense oligonucleotide
  misc_feature (1)..(1): BNA scaffold modification
  misc_feature (5)..(5): BNA scaffold modification
  misc_feature (16)..(16): BNA scaffold modification
aacuguugccuccggt

SEQ ID NO: 6010 - RNA, 16 nt, Artificial Sequence
  Antisense oligonucleotide
  misc_feature (1)..(1): BNA scaffold modification
  misc_feature (8)..(8): BNA scaffold modification
  misc_feature (16)..(16): BNA scaffold modification
aacuguugccuccggt

SEQ ID NO: 6011 - RNA, 16 nt, Artificial Sequence
  Antisense oligonucleotide
  misc_feature (1)..(1): BNA scaffold modification
  misc_feature (15)..(16): BNA scaffold modification
aacuguugccuccggt

SEQ ID NO: 6012 - RNA, 16 nt, Artificial Sequence
  Antisense oligonucleotide
  misc_feature (1)..(1): BNA scaffold modification
  misc_feature (3)..(3): BNA scaffold modification
  misc_feature (5)..(5): BNA scaffold modification
  misc_feature (16)..(16): BNA scaffold modification
aacuguugccuccggt

SEQ ID NO: 6013 - RNA, 16 nt, Artificial Sequence
  Antisense oligonucleotide
  misc_feature (1)..(1): BNA scaffold modification
  misc_feature (3)..(3): BNA scaffold modification
  misc_feature (8)..(8): BNA scaffold modification
  misc_feature (16)..(16): BNA scaffold modification
aacuguugccuccggt

SEQ ID NO: 6014 - RNA, 16 nt, Artificial Sequence
  Antisense oligonucleotide
  misc_feature (1)..(2): BNA scaffold modification
  misc_feature (5)..(5): BNA scaffold modification
  misc_feature (16)..(16): BNA scaffold modification
aacuguugccuccggt

SEQ ID NO: 6015 - RNA, 16 nt, Artificial Sequence
  Antisense oligonucleotide
  misc_feature (1)..(3): BNA scaffold modification
  misc_feature (16)..(16): BNA scaffold modification
aacuguugccuccggt

SEQ ID NO: 6016 - RNA, 16 nt, Artificial Sequence
  Antisense oligonucleotide
  misc_feature (3)..(3): BNA scaffold modification
  misc_feature (5)..(5): BNA scaffold modification
  misc_feature (15)..(16): BNA scaffold modification
aacuguugccuccggt

SEQ ID NO: 6017 - RNA, 16 nt, Artificial Sequence
  Antisense oligonucleotide
  misc_feature (1)..(1): BNA scaffold modification
  misc_feature (16)..(16): BNA scaffold modification
acuguugccuccggut

SEQ ID NO: 6018 - RNA, 16 nt, Artificial Sequence
  Antisense oligonucleotide
  misc_feature (1)..(2): BNA scaffold modification
  misc_feature (16)..(16): BNA scaffold modification
acuguugccuccggut

SEQ ID NO: 6019 - RNA, 16 nt, Artificial Sequence
  Antisense oligonucleotide
  misc_feature (1)..(1): BNA scaffold modification
  misc_feature (4)..(4): BNA scaffold modification
  misc_feature (16)..(16): BNA scaffold modification
acuguugccuccggut

SEQ ID NO: 6020 - RNA, 16 nt, Artificial Sequence
  Antisense oligonucleotide
  misc_feature (1)..(1): BNA scaffold modification
  misc_feature (7)..(7): BNA scaffold modification
  misc_feature (16)..(16): BNA scaffold modification
acuguugccuccggut

SEQ ID NO: 6021 - RNA, 16 nt, Artificial Sequence
  Antisense oligonucleotide
  misc_feature (1)..(1): BNA scaffold modification
  misc_feature (11)..(11): BNA scaffold modification
  misc_feature (16)..(16): BNA scaffold modification
acuguugccuccggut

SEQ ID NO: 6022 - RNA, 16 nt, Artificial Sequence
  Antisense oligonucleotide
  misc_feature (1)..(1): BNA scaffold modification
  misc_feature (15)..(16): BNA scaffold modification
acuguugccuccggtt

SEQ ID NO: 6023 - RNA, 16 nt, Artificial Sequence
  Antisense oligonucleotide
  misc_feature (1)..(2): BNA scaffold modification
  misc_feature (4)..(4): BNA scaffold modification
  misc_feature (16)..(16): BNA scaffold modification
acuguugccuccggut

SEQ ID NO: 6024 - RNA, 16 nt, Artificial Sequence
  Antisense oligonucleotide
  misc_feature (1)..(2): BNA scaffold modification
  misc_feature (7)..(7): BNA scaffold modification
  misc_feature (16)..(16): BNA scaffold modification
acuguugccuccggut

SEQ ID NO: 6025 - RNA, 16 nt, Artificial Sequence
  Antisense oligonucleotide
  misc_feature (1)..(1): BNA scaffold modification
  misc_feature (7)..(7): BNA scaffold modification
  misc_feature (14)..(14): BNA scaffold modification
  misc_feature (16)..(16): BNA scaffold modification
acuguugccuccggut

SEQ ID NO: 6026 - RNA, 16 nt, Artificial Sequence
  Antisense oligonucleotide
  misc_feature (2)..(2): BNA scaffold modification
  misc_feature (4)..(4): BNA scaffold modification
  misc_feature (15)..(16): BNA scaffold modification
acuguugccuccggtt

SEQ ID NO: 6027 - RNA, 16 nt, Artificial Sequence
  Antisense oligonucleotide
  misc_feature (1)..(1): BNA scaffold modification
  misc_feature (4)..(4): BNA scaffold modification
  misc_feature (15)..(16): BNA scaffold modification
acuguugccuccggtt

SEQ ID NO: 6028 - RNA, 16 nt, Artificial Sequence
  Antisense oligonucleotide
  misc_feature (1)..(1): BNA scaffold modification
  misc_feature (16)..(16): BNA scaffold modification
cuguugccuccgguuc

SEQ ID NO: 6029 - RNA, 16 nt, Artificial Sequence
  Antisense oligonucleotide
  misc_feature (1)..(1): BNA scaffold modification
  misc_feature (3)..(3): BNA scaffold modification
  misc_feature (16)..(16): BNA scaffold modification
cuguugccuccgguuc

SEQ ID NO: 6030 - RNA, 16 nt, Artificial Sequence
  Antisense oligonucleotide
  misc_feature (1)..(1): BNA scaffold modification
  misc_feature (6)..(6): BNA scaffold modification
  misc_feature (16)..(16): BNA scaffold modification
cuguugccuccgguuc

SEQ ID NO: 6031 - RNA, 16 nt, Artificial Sequence
  Antisense oligonucleotide
  misc_feature (1)..(1): BNA scaffold modification
  misc_feature (10)..(10): BNA scaffold modification
  misc_feature (16)..(16): BNA scaffold modification
cuguugccuccgguuc

SEQ ID NO: 6032 - RNA, 16 nt, Artificial Sequence
  Antisense oligonucleotide
  misc_feature (1)..(1): BNA scaffold modification
  misc_feature (13)..(13): BNA scaffold modification
  misc_feature (16)..(16): BNA scaffold modification
cuguugccuccgguuc

SEQ ID NO: 6033 - RNA, 16 nt, Artificial Sequence
  Antisense oligonucleotide
  misc_feature (1)..(1): BNA scaffold modification
  misc_feature (3)..(3): BNA scaffold modification
  misc_feature (6)..(6): BNA scaffold modification
  misc_feature (16)..(16): BNA scaffold modification
cuguugccuccgguuc

SEQ ID NO: 6034 - RNA, 16 nt, Artificial Sequence
  Antisense oligonucleotide
  misc_feature (1)..(1): BNA scaffold modification
  misc_feature (3)..(3): BNA scaffold modification
  misc_feature (13)..(13): BNA scaffold modification
  misc_feature (16)..(16): BNA scaffold modification
cuguugccuccgguuc

SEQ ID NO: 6035 - RNA, 16 nt, Artificial Sequence
  Antisense oligonucleotide
  misc_feature (1)..(2): BNA scaffold modification
  misc_feature (15)..(16): BNA scaffold modification
ctguugccuccggutc

SEQ ID NO: 6036 - RNA, 16 nt, Artificial Sequence
  Antisense oligonucleotide
  misc_feature (1)..(2): BNA scaffold modification
  misc_feature (15)..(16): BNA scaffold modification
ctguugccuccggutc

SEQ ID NO: 6037 - RNA, 16 nt, Artificial Sequence
  Antisense oligonucleotide
  misc_feature (1)..(3): BNA scaffold modification
  misc_feature (16)..(16): BNA scaffold modification
ctguugccuccgguuc

SEQ ID NO: 6038 - RNA, 16 nt, Artificial Sequence
  Antisense oligonucleotide
  misc_feature (1)..(1): BNA scaffold modification
  misc_feature (16)..(16): BNA scaffold modification
tguugccuccgguuct

SEQ ID NO: 6039 - RNA, 16 nt, Artificial Sequence
  Antisense oligonucleotide
  misc_feature (1)..(2): BNA scaffold modification
  misc_feature (16)..(16): BNA scaffold modification
tguugccuccgguuct

SEQ ID NO: 6040 - RNA, 16 nt, Artificial Sequence
  Antisense oligonucleotide
  misc_feature (1)..(1): BNA scaffold modification
  misc_feature (5)..(5): BNA scaffold modification
  misc_feature (16)..(16): BNA scaffold modification
tguugccuccgguuct

SEQ ID NO: 6041 - RNA, 16 nt, Artificial Sequence
  Antisense oligonucleotide
  misc_feature (1)..(1): BNA scaffold modification
  misc_feature (9)..(9): BNA scaffold modification
  misc_feature (16)..(16): BNA scaffold modification
tguugccuccgguuct

SEQ ID NO: 6042 - RNA, 16 nt, Artificial Sequence
  Antisense oligonucleotide
  misc_feature (1)..(1): BNA scaffold modification
  misc_feature (12)..(12): BNA scaffold modification
  misc_feature (16)..(16): BNA scaffold modification
tguugccuccgguuct

SEQ ID NO: 6043 - RNA, 16 nt, Artificial Sequence
  Antisense oligonucleotide
  misc_feature (1)..(1): BNA scaffold modification
  misc_feature (15)..(16): BNA scaffold modification
tguugccuccgguuct

SEQ ID NO: 6044 - RNA, 16 nt, Artificial Sequence
  Antisense oligonucleotide
  misc_feature (1)..(1): BNA scaffold modification
  misc_feature (7)..(7): BNA scaffold modification
  misc_feature (15)..(16): BNA scaffold modification
tguugccuccgguuct

SEQ ID NO: 6045 - RNA, 16 nt, Artificial Sequence
  Antisense oligonucleotide
  misc_feature (1)..(2): BNA scaffold modification
  misc_feature (15)..(16): BNA scaffold modification
tguugccuccgguuct

SEQ ID NO: 6046 - RNA, 16 nt, Artificial Sequence
  Antisense oligonucleotide
  misc_feature (1)..(2): BNA scaffold modification
  misc_feature (5)..(5): BNA scaffold modification
  misc_feature (15)..(16): BNA scaffold modification
tguugccuccgguuct

SEQ ID NO: 6047 - RNA, 16 nt, Artificial Sequence
  Antisense oligonucleotide
  misc_feature (1)..(1): BNA scaffold modification
  misc_feature (5)..(5): BNA scaffold modification
  misc_feature (7)..(7): BNA scaffold modification
  misc_feature (15)..(16): BNA scaffold modification
tguugccuccgguuct

SEQ ID NO: 6048 - RNA, 16 nt, Artificial Sequence
  Antisense oligonucleotide
  misc_feature (1)..(1): BNA scaffold modification
  misc_feature (5)..(7): BNA scaffold modification
  misc_feature (10)..(10): BNA scaffold modification
  misc_feature (15)..(16): BNA scaffold modification
tguugccuccgguuct

SEQ ID NO: 6049 - RNA, 25 nt, Artificial Sequence
  Antisense oligonucleotide
uuugccgcugcccaaugccauccug

SEQ ID NO: 6050 - DNA, 20 bp, Artificial Sequence
  DMD43-45 forward primer
cccagcttgatttccaatgg

SEQ ID NO: 6051 - DNA, 15 bp, Artificial Sequence
  DMD43-45 reverse primer
gccgctgcccaatgc

SEQ ID NO: 6052 - DNA, 16 bp, Artificial Sequence
  DMD43-45 probe
accgacaagggaactc

SEQ ID NO: 6053 - DNA, 24 bp, Artificial Sequence
  DMD44-45 forward primer
tgggaacatgctaaatacaaatgg

SEQ ID NO: 6054 - DNA, 15 bp, Artificial Sequence
  DMD44-45 reverse primer
tgccgctgcccaatg

SEQ ID NO: 6055 - DNA, 21 bp, Artificial Sequence
  DMD44-45 probe
atcttaaggaactccaggatg

SEQ ID NO: 6056 - DNA, 26 bp, Artificial Sequence
  DMD44-46.2 forward primer
gagaattgggaacatgctaaatacaa

SEQ ID NO: 6057 - DNA, 25 bp, Artificial Sequence
  DMD44-46.2 reverse primer
cctccaaccataaaacaaattcatt

SEQ ID NO: 6058 - DNA, 22 bp, Artificial Sequence
  DMD44-46.2 probe
tatcttaaggctagaagaacaa

SEQ ID NO: 6059 - DNA, 23 bp, Artificial Sequence
  DMD52-54 forward primer
ccagcaatcaagaggctagaaca

SEQ ID NO: 6060 - DNA, 25 bp, Artificial Sequence
  DMD52-54 reverse primer
tcatttgccacatctacatttgtct

SEQ ID NO: 6061 - DNA, 19 bp, Artificial Sequence
  DMD52-54 probe
attacggatcgaacagttg

SEQ ID NO: 6062 - DNA, 26 bp, Artificial Sequence
  DMD53-54 forward primer
gtccctatacagtagatgcaatccaa

SEQ ID NO: 6063 - DNA, 18 bp, Artificial Sequence
  DMD53-54 reverse primer
gccactggcggaggtctt

SEQ ID NO: 6064 - DNA, 18 bp, Artificial Sequence
  DMD53-54 probe
acagaaaccaagcagttg

SEQ ID NO: 6065 - RNA, 148 nt, Artificial Sequence
  reverse complementary sequence of human DMD exon 44
cuuaagauaccauuuguauuuagcauguucccaauucucaggaauuugugucuuucugagaaacuguucagcuucuguuagccacugauuaaauaucuuuauaucauaaugaaaacgccgccauuucucaacagaucugucaaaucgc

SEQ ID NO: 6066 - RNA, 176 nt, Artificial Sequence
  reverse complementary sequence of human DMD exon 45
cucuuuuuucugucugacagcuguuugcagaccuccugccaccgcagauucaggcuucccaauuuuuccuguagaauacuggcaucuguuuuugaggauugcugaauuauuucuuccccaguugcauucaauguucugacaacaguuugccgcugcccaaugccauccuggaguuc

SEQ ID NO: 6067 - RNA, 233 nt, Artificial Sequence
  reverse complementary sequence of human DMD exon 51
cuucugcuugaugaucaucucguugauauccucaaggucacccaccaucacccucugugauuuuauaacuugaucaagcagagaaagccagucgguaaguucuguccaagcccgguugaaaucugccagagcagguaccuccaacaucaaggaagauggcauuucuaguuuggagauggcaguuuccuuaguaaccacagguugugucaccagaguaacagucugaguaggag

SEQ ID NO: 6068 - RNA, 118 nt, Artificial Sequence
  reverse complementary sequence of human DMD exon 52
uucgauccguaaugauuguucuagccucuugauugcuggucuuguuuuucaaauuuugggcagcgguaaugaguucuuccaacuggggacgccucuguuccaaauccugcauuguugc

SEQ ID NO: 6069 - RNA, 212 nt, Artificial Sequence
  reverse complementary sequence of human DMD exon 53
cuugguuucugugauuuucuuuuggauugcaucuacuguauagggacccuccuuccaugacucaagcuuggcucuggccuguccuaagaccugcucagcuucuuccuuagcuuccagccauuguguugaauccuuuaacauuucauucaacuguugccuccgguucugaagguguucuuguacuucaucccacugauucugaauucuuucaa

SEQ ID NO: 6070 - RNA, 190 nt, Artificial Sequence
  reverse complementary sequence of human DMD exon 55
uugccauuguuucaucagcucuuuuacucccuuggagucuucuaggagccuuuccuuacggguagcauccuguaggacauuggcaguuguuucagcuucuguaagccaggcaagaaacuuuuccagguccagggggaacuguugcaguaaucuaugaguuucuuccaaagcagccucucgcucacucacc

SEQ ID NO: 6071 - RNA, 25 nt, Artificial Sequence
  Antisense oligonucleotide
  misc_feature (1)..(1): n is 2'-O-methyluridine
  misc_feature (2)..(2): n is 2'-O-methyluridine
  misc_feature (3)..(3): n is 2'-O-methyluridine
  misc_feature (4)..(4): n is 2'-O-methylguanosine
  misc_feature (5)..(5): n is 2'-O-methyl-5-methylcytidine
  misc_feature (6)..(6): n is 2'-O-methyl-5-methylcytidine
  misc_feature (7)..(7): n is 2'-O-methylguanosine
  misc_feature (8)..(8): n is 2'-O-methyl-5-methylcytidine
  misc_feature (9)..(9): n is 2'-O-methyluridine
  misc_feature (10)..(10): n is 2'-O-methylguanosine
  misc_feature (11)..(11): n is 2'-O-methyl-5-methylcytidine
  misc_feature (12)..(12): n is 2'-O-methyl-5-methylcytidine
  misc_feature (13)..(13): n is 2'-O-methyl-5-methylcytidine
  misc_feature (14)..(14): n is 2'-O-methyladenosine
  misc_feature (15)..(15): n is 2'-O-methyladenosine
  misc_feature (16)..(16): n is 2'-O-methyluridine
  misc_feature (17)..(17): n is 2'-O-methylguanosine
  misc_feature (18)..(18): n is 2'-O-methyl-5-methylcytidine
  misc_feature (19)..(19): n is 2'-O-methyl-5-methylcytidine
  misc_feature (20)..(20): n is 2'-O-methyladenosine
  misc_feature (21)..(21): n is 2'-O-methyluridine
  misc_feature (22)..(22): n is 2'-O-methyl-5-methylcytidine
  misc_feature (23)..(23): n is 2'-O-methyl-5-methylcytidine
  misc_feature (24)..(24): n is 2'-O-methyluridine
  misc_feature (25)..(25): n is 2'-O-methylguanosine
nnnnnnnnnnnnnnnnnnnnnnnnn

SEQ ID NO: 6072 - RNA, 12 nt, Artificial Sequence
  Core sequence exon 51
ggaagauggcau

SEQ ID NO: 6073 - RNA, 18 nt, Artificial Sequence
  Core sequence exon 51
  misc_feature (10)..(10): n is T or U
gguaaguucnguccaagc

SEQ ID NO: 6074 - RNA, 14 nt, Artificial Sequence
  Core sequence exon 45
cccaauuuuuccug

SEQ ID NO: 6075 - RNA, 15 nt, Artificial Sequence
  Core sequence exon 45
cccaaugccauccug

SEQ ID NO: 6076 - RNA, 12 nt, Artificial Sequence
  Core sequence exon 44
cuucuguuagcc

SEQ ID NO: 6077 - RNA, 9 nt, Artificial Sequence
  Core sequence exon 44
uauuuagca

SEQ ID NO: 6078 - RNA, 9 nt, Artificial Sequence
  Core sequence exon 44
ggaauuugu

SEQ ID NO: 6079 - RNA, 9 nt, Artificial Sequence
  Core sequence exon 44
cucaacaga

SEQ ID NO: 6080 - RNA, 7 nt, Artificial Sequence
  Core sequence exon 45
gcccaau

SEQ ID NO: 6081 - RNA, 8 nt, Artificial Sequence
  Core sequence exon 45
ccaauuuu

SEQ ID NO: 6082 - RNA, 7 nt, Artificial Sequence
  Core sequence exon 45
gcccaau

SEQ ID NO: 6083 - RNA, 10 nt, Artificial Sequence
  Core sequence exon 45
ucugacaaca

SEQ ID NO: 6084 - RNA, 11 nt, Artificial Sequence
  Core sequence exon 45
caaugccaucc

SEQ ID NO: 6085 - RNA, 10 nt, Artificial Sequence
  Core sequence exon 51
aagauggcau

SEQ ID NO: 6086 - RNA, 14 nt, Artificial Sequence
  Core sequence exon 51
uaaguucuguccaa

SEQ ID NO: 6087 - RNA, 14 nt, Artificial Sequence
  Core sequence exon 53
guugccuccgguuc

SEQ ID NO: 6088 - RNA, 7 nt, Artificial Sequence
  Core sequence exon 53
gguucug

SEQ ID NO: 6089 - RNA, 10 nt, Artificial Sequence
  Core sequence exon 53
gauucugaau

SEQ ID NO: 6090 - RNA, 8 nt, Artificial Sequence
  Core sequence exon 53
acuucauc

SEQ ID NO: 6091 - RNA, 8 nt, Artificial Sequence
  Core sequence exon 53
uuccauga

SEQ ID NO: 6092 - RNA, 8 nt, Artificial Sequence
  Core sequence exon 53
uguugccu
